(19) United States
(12) Patent Application Publication
(10) Pub. No.: US 2006/0019269 A1
(43) Pub. Date: Jan. 26, 2006

(54) Susceptibility gene for myocardial infarction, stroke, and PAOD, methods of treatment

(75) Inventors: Anna Helgadottir, Reykjavik (IS); Hakon Hakonarson, Reykjavik (IS); Jeffrey R. Gulcher, Lake Barrington, IL (US); Mark E. Gurney, Grand Rapids, MI (US)

Correspondence Address: MARSHALL, GERSTEIN & BORUN LLP, 233 S. WACKER DRIVE, SUITE 6300, SEARS TOWER, CHICAGO, IL, 60606, US

(73) Assignee: deCODE Genetics, Inc., Reykjavik (IE)

(21) Appl. No.: 11/096,191

(22) Filed: Mar. 30, 2005

Related U.S. Application Data
(63) Continuation-in-part of application No. PCT/US05/03312, filed on Jan. 31, 2005.
Application No. PCT/US05/03312 is a continuation-in-part of application No. 10/830,477, filed on Apr. 22, 2004.
Application No. 10/830,477 is a continuation-in-part of application No. 10/769,744, filed on Jan. 30, 2004.
Application No. 10/769,744 is a continuation-in-part of application No. PCT/US03/32556, filed on Oct. 16, 2003.
(63) Continuation-in-part of application No. PCT/US04/30582, filed on Sep. 17, 2004.
(60) Provisional application No. 60/419,433, filed on Oct. 17, 2002.
(60) Provisional application No. 60/449,331, filed on Feb. 21, 2003.
(60) Provisional application No. 60/642,909, filed on Jan. 10, 2005.
(60) Provisional application No. 60/503,587, filed on Sep. 17, 2003.

(51) Int. Cl. C12Q 1/68; A61K 31/401; A61K 31/366; A61K 31/225

(52) U.S. Cl. 435/6; 514/423; 514/460; 514/548

(57) ABSTRACT

Linkage of myocardial infarction (MI) and a locus on chromosome 13q12 is disclosed. In particular, the FLAP gene within this locus is shown by genetic association analysis to be a susceptibility gene for MI and ACS, as well as stroke and PAOD. Pathway targeting for treatment and diagnostic applications in identifying those who are at risk of developing MI, ACS, stroke or PAOD, in particular are described. The invention also provides for compositions comprising a leukotriene synthesis inhibitor and a stating and methods of using these compositions to reduce C-reactive protein in a human subject at risk of MI, ACS, stroke and/or PAOD.

[0001] This application is a continuation-in-part of International Application No. PCT/US05/03312, filed Jan. 31, 2005 which claims priority benefit of U.S. Application No. 60/642,909, filed Jan. 10, 2005, and is also a continuation-in part of U.S. patent application Ser. No. 10/830,477, filed Apr. 22, 2004, which is a continuation-in-part of U.S. patent application Ser. No. 10/769,744, filed Jan. 30, 2004, which is a continuation-in-part of International Application No. PCT/US03/32556, filed on Oct. 16, 2003, which claims the benefit of U.S. Provisional Application No. 60/419,433, filed on Oct. 17, 2002 and U.S. Provisional Application No. 60/449,331, filed on Feb. 21, 2003. This application is also a continuation-in-part of International Application No. PCT/US04/030582, filed Sep. 17, 2004, which claims priority benefit of U.S. Provisional Application No. 60/503,587, filed Sep. 17, 2003. Each of the priority applications is specifically incorporated herein by reference in their entirety, without prejudice or disclaimer.

### BACKGROUND OF THE INVENTION

[0002] Myocardial infarction (MI) and Acute Coronary Syndrome (ACS), e.g., unstable angina, non-ST-elevation myocardial infarction (NSTEMI) or ST-elevation myocardial infarction (STEMI), are the leading causes of hospital admissions in industrialized countries. Cardiovascular disease continues to be the principle cause of death in the United States, Europe and Japan. The costs of the disease are high both in terms of morbidity and mortality, as well as in terms of the financial burden on health care systems.

[0003] Myocardial infarction generally occurs when there is an abrupt decrease in coronary blood flow following a thrombotic occlusion of a coronary artery previously damaged by atherosclerosis. In most cases, infarction occurs when an atherosclerotic plaque fissures, ruptures or ulcerates and when conditions favor thrombogenesis. In rare cases, infarction may be due to coronary artery occlusion caused by coronary emboli, congenital abnormalities, coronary spasm, and a wide variety of systemic, particularly inflammatory diseases. Medical risk factors for MI include cigarette smoking, diabetes, hypertension and serum total cholesterol levels >200 mg/dL, elevated serum LDL cholesterol, and low serum HDL cholesterol. Event rates in individuals without a prior history of cardiovascular disease are about 1%. In individuals who have had a first MI or ACS, the risk of a repeat MI within the next year is 10-14%, despite maximal medical management including angioplasty and stent placement.

[0004] Atherosclerosis can affect vascular beds in many large and medium arteries. Myocardial infarction and unstable angina (acute coronary syndrome (ACS)) stem from coronary artery atherosclerosis, while ischemic stroke most frequently is a consequence of carotid or cerebral artery atherosclerosis. Limb ischemia caused by peripheral arterial occlusive disease (PAOD) may occur as a consequence of iliac, femoral and popliteal artery atherosclerosis. The atherosclerotic diseases remain common despite the wide-spread use of medications that inhibit thrombosis (aspirin) or treat medical risk factors such as elevated cholesterol levels in blood (statins), diabetes, or hypertension (diuretics and anti-hypertensives).

[0005] Atherosclerotic disease is initiated by the accumulation of lipids within the artery wall, and in particular, the accumulation of low-density lipoprotein (LDL) cholesterol. The trapped LDL becomes oxidized and internalized by macrophages. This causes the formation of atherosclerotic lesions containing accumulations of cholesterol-engorged macrophages, referred to as “foam cells”. As disease progresses, smooth muscle cells proliferate and grow into the artery wall forming a “fibrous cap” of extracellular matrix enclosing a lipid-rich, necrotic core. Present in the arterial walls of most people throughout their lifetimes, fibrous atherosclerotic plaques are relatively stable. Such fibrous lesions cause extensive remodeling of the arterial wall, outwardly displacing the external, elastic membrane, without reduction in luminal diameter or serious impact on delivery of oxygen to the heart. Accordingly, patients can develop large, fibrous atherosclerotic lesions without luminal narrowing until late in the disease process. However, the coronary arterial lumen can become gradually narrowed over time and in some cases compromise blood flow to the heart, especially under high demand states such as exercise. This can result in reversible ischemia causing chest pain relieved by rest called stable angina.

[0006] In contrast to the relative stability of fibrous atherosclerotic lesions, the culprit lesions associated with myocardial infarction and unstable angina (each of which are part of the acute coronary syndrome) are characterized by a thin fibrous cap, a large lipid core, and infiltration of inflammatory cells such as T-lymphocytes and monocyte/macrophages. Non-invasive imaging techniques have shown that most MI's occur at sites with low- or intermediate-grade stenoses, indicating that coronary artery occlusion is due most frequently to rupture of culprit lesions with consequent formation of a thrombus or blood clot and not solely due to luminal narrowing by stenosis. Plaque rupture may be due to erosion or uneven thinning of the fibrous cap, usually at the margins of the lesion where macrophages enter, accumulate, and become activated by a local inflammatory process. Thinning of the fibrous cap may result from degradation of the extracellular matrix by proteases released from activated macrophages. These changes producing plaque instability and risk of MI may be augmented by production of tissue-factor procoagulant and other factors increasing the likelihood of thrombosis.

[0007] In acute coronary syndrome, the culprit lesion showing rupture or erosion with local thrombosis typically is treated by angioplasty or by balloon dilation and placement of a stent to maintain luminal patency. Patients experiencing ACS are at high risk for a second coronary event due to the multi-vessel nature of coronary artery disease with event rates approaching 10-14% within 12 months after the first incident.

[0008] The emerging view of MI is as an inflammatory disease of the arterial vessel wall on preexisting chronic atherosclerotic lesions, sometimes triggering rupture of culprit lesions and leading to local thrombosis and subsequent myocardial infarction. The process that triggers and sustains arterial wall inflammation leading to plaque instability is unknown, however, it results in the release into the circulation of tumor necrosis factor alpha and interleukin-6. These and other cytokines or biological mediators released from the damaged vessel wall stimulate an inflammatory response in the liver causing elevation in several non-specific general inflammatory markers including C-reactive protein. Although not specific to atherosclerosis, elevated C-reactive protein (CRP) and serum amyloid A appear to predict risk for MI, perhaps as surrogates for vessel wall inflammation.

[0009] Although classical risk factors such as smoking, hyperlipidemia, hypertension, and diabetes are associated with many cases of coronary heart disease (CHD) and MI, many patients do not have involvement of these risk factors. In fact, many patients who exhibit one or more of these risk factors do not develop MI. Family history has long been recognized as one of the major risk factors. Although some of the familial clustering of MI reflects the genetic contribution to the other conventional risk factors, a large number of studies have suggested that there are significant genetic susceptibility factors, beyond those of the known risk factors (Friedlander Y, et al., Br. Heart J. 1985; 53:382-7, Shea S. et al., J. Am. Coll. Cardiol. 1984; 4:793-801, and Hopkins P. N., et al., Am. J. Cardiol. 1988; 62:703-7). Major genetic susceptibility factors have only been identified for the rare Mendelian forms of hyperlipidemia such as a familial hypercholesterolemia.

[0010] Genetic risk is conferred by subtle differences in genes among individuals in a population. Genes differ between individuals most frequently due to single nucleotide polymorphisms (SNP), although other variations are also important. SNP are located on average every 1000 base pairs in the human genome. Accordingly, a typical human gene containing 250,000 base pairs may contain 250 different SNP. Only a minor number of SNP are located in exons and alter the amino acid sequence of the protein encoded by the gene. Most SNP have no effect on gene function, while others may alter transcription, splicing, translation, or stability of the mRNA encoded by the gene. Additional genetic polymorphism in the human genome is caused by insertion, deletion, translocation, or inversion of either short or long stretches of DNA. Genetic polymorphisms conferring disease risk may therefore directly alter the amino acid sequence of proteins, may increase the amount of protein produced from the gene, or may decrease the amount of protein produced by the gene.

[0011] As genetic polymorphisms conferring risk of disease are uncovered, genetic testing for such risk factors is becoming important for clinical medicine. Examples are apolipoprotein E testing to identify genetic carriers of the apoE4 polymorphism in dementia patients for the differential diagnosis of Alzheimer's disease, and of Factor V Leiden testing for predisposition to deep venous thrombosis. More importantly, in the treatment of cancer, diagnosis of genetic variants in tumor cells is used for the selection of the most appropriate treatment regime for the individual patient. In breast cancer, genetic variation in estrogen receptor expression or heregulin type 2 (Her2) receptor tyrosine kinase expression determine if anti-estrogenic drugs (tamoxifen) or anti-Her2 antibody (Herceptin) will be incorporated into the treatment plan. In chronic myeloid leukemia (CML) diagnosis of the Philadelphia chromosome genetic translocation fusing the genes encoding the Bcr and Ab1 receptor tyrosine kinases indicates that Gleevec (ST1571), a specific inhibitor of the Bcr-Ab1 kinase should be used for treatment of the cancer. For CML patients with such a genetic alteration, inhibition of the Bcr-Ab1 kinase leads to rapid elimination of the tumor cells and remission from leukemia.

[0012] Many general inflammatory markers predict risk of coronary heart disease, although these markers are not specific to atherosclerosis. For example, Stein (Stein, S., Am J Cardiol, 87 (suppl):21A-26A (2001)) discusses the use of any one of the following serum inflammatory markers as surrogates for predicting risk of coronary heart disease including C-reactive protein (CRP), serum amyloid A, fibrinogen, interleukin-6, tissue necrosis factor-alpha, soluble vascular cell adhesion molecules (sVCAM), soluble intervascular adhesion molecules (sICAM), E-selectin, matrix metalloprotease type-1, matrix metalloprotease type-2, matrix metalloprotease type-3, and matrix metalloprotease type-9. Elevation in one more of these serum inflammatory markers is not specific to coronary heart disease but also occurs with age or in association with cerebrovascular disease, peripheral vascular disease, non-insulin dependent diabetes, osteoarthritis, bacterial infection, and sepsis.

[0013] Serum C-reactive protein (CRP) is viewed as a convenient and sensitive marker of systemic inflammation. Generally CRP is measured in serum samples using commercially available enzyme-linked immunosorbent assays (EIA). Consistent across multiple published studies is the finding of a correlation between increased risk for coronary artery disease with increased serum CRP. For example, in the Women's Health Study, CRP was measured in 27,939 apparently healthy American women. The cut-off points for quintiles of serum CRP in women were: less than or equal to 0.49, more than 0.49 to 1.08, more than 1.08 to 2.09, more than 2.09 to 4.19, and more than 4.19 mg CRP per liter, see Ridker, P. M. et al., New England. J. Med., 347: 1557-1565 (2001). In comparison to the lowest quintile, and even when adjusting for age, every quintile more than 0.49 mg CRP per liter was associated with increased risk for coronary heart disease with the highest relative risk of 4.5 seen for those women in the highest quintile of serum CRP (more than 4.19 mg CRP per liter). A similar correlation between increased serum CRP and increased risk for coronary heart disease in women has been reported (Ridker, P. M et al., New England. J. Med., 342:836-843 (2000) and Bermudez, E. A. et. al., Arterioscler. Thromb. Vasc. Biol., 22: 1668-1673 (2002)). Men also show a correlation between increased serum inflammatory markers such as CR and increased risk for coronary heart disease has been reported (Doggen, C. J. M. et al., J. Internal Med., 248:406-414 (2000) and Ridker, P. M. et al., New England. J. Med., 336: 973-979 (1997)). Quintiles for serum CRP as reported by Doggen et al., were less than 0.65, more than 0.65 to 1.18, more than 1.18 to 2.07, more than 2.07 to 4.23, and more than 4.23 mg CRP per liter. Unlike women, elevated serum CRP correlates with increased relative risk for coronary heart disease only in the 4^{th} and 5^{th} quintiles of CRP (relative risk of 1.7x and 1.9x, respectively).

[0014] Serum CRP in women also has been measured in conjunction with lipid markers such as levels of serum low density lipoprotein-cholesterol (LDL-C). In the study by Ridker, P. M. et al. (2002), serum CRP and LDL-C are minimally correlated, screening for both serum markers provided better prognostic indication than either alone. Thus, women with serum CRP above median values (more than 1.52 mg CRP per liter) and also serum LDL-C above median values (more than 123.7 mg LDL-C per deciliter) were at highest risk for coronary heart disease.

[0015] Elevated CRP or other serum inflammatory markers is also prognostic for increased risk of a second myocardial infarct in patients with a previous myocardial infarct (Retterstol, L. et al., Atheroscler., 160: 433-440 (2002)).

[0016] Since CRP is produced in the liver, there is no a priori mechanistic explanation for why elevation in CRP and other serum inflammatory markers should be prognostic for coronary artery disease. As discussed by Doggen, C. J. M., et al., one or more of the following factors were speculated to account for the correlation observed: (1) intrinsic inflammation and tissue damage within arterial lesions, (2) prior infection by Helicobacter pylori or by Chlamydia pneumoniae, (3) release of peptide cytokines including interleukin-6, or (4) activation of the complement system.

[0017] The end products of the leukotriene pathway are potent inflammatory lipid mediators derived from arachidonic acid. They can potentially contribute to development of atherosclerosis and destabilization of atherosclerotic plaques through lipid oxidation and/or proinflammatory effects. LTC4, LTD4, and LTE4, are known to induce vasoconstriction. Allen et al., Circulation, 97:2406-2413 (1998) described a novel mechanism in which atherosclerosis is associated with the appearance of a leukotriene receptor(s) capable of inducing hyperactivity of human epicardial coronary arteries in response to LTC4 and LTD4. LTB4, on the other hand, is a strong proinflammatory agent. Increased production of these end products, of the leukotriene pathway, could therefore serve as a risk factor for MI and atherosclerosis, whereas both inflammation and vasoconstriction/vasospasm have a well established role in the pathogenesis of MI and atherosclerosis. It has also been shown that a heterozygous deficiency of the 5-LO enzyme in a knockout mouse model decreases atherosclerotic lesion size in LDLR−/− mice by about 95%. (Mehrabian et al., Circulation Research. 91:120 (2002)). However, such genetic evidence for leukotriene involvement in MI or atherosclerosis in humans has not been reported. Mehrabian et al. did report a very small genetic association study looking for correlation between promoter polymorphisms of 5-LO and carotid intimal thickening in normal individuals. However, their data paradoxically suggest that a lower amount of leukotriene production correlates with carotid atherosclerosis.

### SUMMARY OF THE INVENTION

[0018] As described herein, a gene on chromosome 13q12-13 has been identified as playing a major role in myocardial infarction (MI). This gene, herein after referred to as the MI gene, comprises nucleic acid that encodes 5-lipoxygenase activating protein (ALOX5AP or FLAP) herein after referred to as FLAP. The gene has also been shown to play a role in stroke and PAOD. In addition, a gene on chromosome 12q23 has been identified as playing a major role in myocardial infarction (MI). The gene comprises nucleic acid that encodes leukotriene A4 hydrolase, herein after referred to as LTA4H.

[0019] The invention pertains to methods of treatment (prophylactic and/or therapeutic) for certain diseases and conditions (e.g., MI, ACS, atherosclerosis, stroke, PAOD) associated with FLAP or with other members of the leukotriene pathway (e.g., biosynthetic enzymes or proteins such as FLAP, arachidonate 4-lipoxygenase (5-LO), leukotriene C4 synthase (LTC4S), leukotriene A4 hydrolase (LTA4H), leukotriene B4 12-hydroxydehydrogenase (LTB4DH)); receptors and/or binding agents of the enzymes; and receptors for the leukotrienes LTA4, LTB4, LTC4, LTD4, LTE4, Cys LT1, Cys LT2, including leukotriene B4 receptor 1 (BLT1), leukotriene B4 receptor 2 (BLT2), cysteinyl leukotriene receptor 1 (CysLTR1), cysteinyl leukotriene receptor 2 (CysLTR2). The methods include the following: methods of treatment for myocardial infarction or susceptibility to myocardial infarction; methods of phophylaxis therapy for myocardial infarction; methods of treatment for transient ischemic attack, transient monocular blindness or stroke, or susceptibility to stroke; methods of treatment for claudication, PAOD or susceptibility to PAOD; methods of treatment for acute coronary syndrome (e.g., unstable angina, non-ST-elevation myocardial infarction (NSTEMI) or ST-elevation myocardial infarction (STEMI)); methods for reducing risk of MI, stroke or PAOD in persons with asymptomatic ankle/brachial index less than 0.9; methods for decreasing risk of a second myocardial infarction or stroke; methods of treatment for atherosclerosis, such as for patients requiring treatment (e.g., angioplasty, stents, revascularization procedure) to restore blood flow in arteries (e.g., coronary, carotid, and/or femoral arteries); methods of treatment for asymptomatic ankle/brachial index of less than 0.9; and/or methods for decreasing leukotriene synthesis (e.g., for treatment of myocardial infarction, stroke or PAOD).

[0020] The invention provides for methods of prophylaxis therapy for myocardial infarction (MI). These methods comprise selecting a human subject susceptible to MI, administering to the subject a composition comprising a therapeutically effective amount of an MI therapeutic agent that inhibits leukotriene synthesis in vivo, wherein the MI therapeutic agent inhibits leukotriene synthesis by inhibiting the activity of at least one protein selected from 5-Lipoxygenase activating protein (FLAP) and 5-lipoxygenase (5-LO). The methods also comprise monitoring myeloperoxidase level before and during the prophylaxis treatement, wherein the MI therapeutic agent is administered in an amount effective to reduce MPO levels in a subject. These methods may further comprise monitoring at least one additional inflammatory marker, such as C-reactive protein, in the human subject before and during the prophylaxis therapy.

[0021] In the methods of the invention, a leukotriene synthesis inhibitor is administered to an individual in a therapeutically effective amount. The leukotriene synthesis inhibitor can be an agent that inhibits or antagonizes a member of the leukotriene synthesis pathway (e.g., FLAP, 5-LO, LTC4S, LTA4H, and LTB4DH). For example, the leukotriene synthesis inhibitor can be an agent that inhibits or antagonizes FLAP polypeptide activity (e.g., a FLAP inhibitor) and/or FLAP nucleic acid expression, as described herein (e.g., a FLAP nucleic acid antagonist). In another embodiment, the leukotriene synthesis inhibitor is an agent that inhibits or antagonizes polypeptide activity and/or nucleic acid expression of another member of the leukotriene biosynthetic pathway (e.g., LTC4S, LTA4H) or that increases breakdown of leukotrienes (e.g., LTB4DH). In preferred embodiments, the agent alters activity and/or nucleic acid expression of FLAP or of 5-LO. Preferred agents include those set forth in the Agent Table I herein. In another embodiment, preferred agents can be: 1-((4-chlorophenyl)methyl)-3-((1,1-dimethylethyl)thio)-alpha,alpha-dimethyl-5-(2-quinolinylmethoxy)-1H-Indole-2-propanoic acid otherwise known as MK-0591, (R)-(+)-alpha-cyclopentyl-4-(2-quinolinylmethoxy)-Benzeneacetic acid otherwise known as BAY-x-1005, 3-(3-(1,1-dimethylethylthio-5-(quinoline-2-ylmethoxy)-1-(4-chloromethylphenyl)indole-2-yl)-2,2-dimethylpropionaldehyde oxime-0-2-acetic acid otherwise known as A-81834, optically pure enantiomers, salts, chemical derivatives, and analogues; or can be zileuton, atreleuton, 6-((3-fluoro-5-(tetrahydro-4-methoxy-2H-pyran-4yl)phenoxy)methyl)-1-methyl-2(1H)-quinlolinone otherwise known as ZD-2138, 1-((4-chlorophenyl)methyl)-3-((1,1dimethylethyl)thio)-alpha,alpha-dimethyl-5-(2-quinolinylmethoxy)-1H-Indole-2-propanoic acid otherwise known as MK-886, 4-(3-(4-(2-Methyl-imidazol-1-yl)-phenylsulfanyl)-phenyl)-tetrahydro-pyran-4-carboxylic acid amide otherwise known as CJ-13610, their optically pure enantiomers, salts, chemical derivatives, and analogues. In another embodiment, the agent alters metabolism or activity of a leukotriene (e.g., LTA4, LTB4, LTC4, LTD4, LTE4, Cys LT1, Cys LT2), such as leukotriene antagonists or antibodies to leukotrienes, as well as agents which alter activity of a leukotriene receptor (e.g., BLT1, BLT2, CysLTR1, and CysLTR2).

[0022] In another preferred embodiments, the agent alters activity and/or nucleic acid expression of LTA4H. Preferred agents include those set forth in the Agent Table and in the Additional LTA4H Agent List herein. In another embodiment, preferred agents can be: ethyl-1-[2-[4-(phenylmethyl)phenoxy]ethyl]-4-piperidine-carboxylate, otherwise known as SC-56938; [4-[5-(3-Phenyl-propyl)thiophen-2-yl]butoxy]acetic acid, otherwise known as RP64966; (R)-S-[[4-(dimethylamino)phenyl]methyl]-N-(3-mercapto-2methyl-1-oxopropyl-L-cycteine, otherwise known as SA6541; optically pure enantiomers, salts, chemical derivatives, and analogues.

[0023] The results in Example 10 demonstrate that in patients with the at-risk FLAP and LTA₄ haplotypes, a FLAP inhibitor (DG-031 also known as Bay-X-1005) had a highly significant and dose-dependent effect at the cellular, whole bood and urinary metabolite level including a 26% reduction in leukotriene B₄ production by activated neutrophils, a 13% reduction of myeloperoxidase in whole blood, and a 27% increase in urinary leukotriene E₄. Furthermore, there was evidence of a persistent effect, following discontinuation of the FLAP inhibitor, on high senstivity C-reactive protein and serum amyloid A. This reduction in CRP and serum amyloid A was observed on top of the beneficial effects that may have been acheived by statins taken by 85% of the study subjects.

[0024] The invention provides for compositions comprising a leukotriene synthesis inhbitor and a statin. The invention also provides for the use of a leukotriene synthesis inhibitor and a statin for the manufacture of a medicament for reducing CRP levels in a human subject. Such compositions are intended for human administration, and preferably further comprising a (at least one) pharmaceutically acceptable diluent, adjuvant, excipient, or carrier. Materials and methods for formulation and co-formulation are well known, and many are described herein in greater detail. In one variation, formulation of the composition into convenient unit dose formulations, such as pills or capsules for oral administration, including sustained release formulations, is specifically contemplated. In another variation, co-administration transdermally, e.g., through a skin patch, is contemplated. In still another variation, administration of one or both agents through a drug eluting stent is specifically contemplated. In particular, the compositions may comprises a leukotriene synthesis inhibitor that inhibits the activity of a member of the leukotriene synthesis pathway such as 5-lipoxygenase, 5-lipoxygenase activating protein (FLAP), leutokriene C4 synthase, leukriene A4 hydolase, arachidonate 4-lipoxygenase, leukotriene B4 12-hydroxydehydrogenase, leukotriene A4 receptor, leukotriene B4 receptor, leukotriene C4 receptor, leukotriene D4 receptor, leukotriene E4 receptor, leukotriene B4 receptor 1, leukotriene B4 receptor 2, cysteinyl leukotriene receptor 1 and cysteinyl leukotriene receptor 2. Any LT inhibitor is suitable for practice of the invention, and several LT inhibitors are described herein. To help minimize side effects, an LT inhibitor that is specific for a member of the LT synthesis pathway is preferred. Exemplary inhibitors include both small molecules, biological inhibitors of proteins, (e.g., antibody substances, peptides), and biological inhibitors that operate at the nucleic acid level (e.g., antisense nucleic acids and interfering RNA nucleic acids and zinc finger proteins).

[0025] Preferred agents that inhibit the activity of a member of the leukotriene pathway are listed in the Agent Table I herein, including the following agents: 1-((4-chlorophenyl)methyl)-3-((1,1-dimethylethyl)thio)-alpha,alpha-dimethyl-5-(2-quinolinylmethoxy)-1H-Indole-2-propanoic acid, (R)-(+)-alpha-cyclopentyl-4-(2-quinolinylmethoxy)-Benzeneacetic acid, 3-(3-(1,1-dimethylethylthio-5-(quinoline-2-ylmethoxy)-1-(4-chloromethylphenyl)indole-2-yl)-2,2-dimethylpropionaldehyde oxime-0-2-acetic acid, zileuton, atreleuton, 6-((3-fluoro-5-(tetrahydro-4-methoxy-2H-pyran-4yl)phenoxy)methyl)-1-methyl-2(1H)-quinlolinone, 1-((4-chlorophenyl)methyl)-3-((1,1 dimethylethyl)thio)-alpha,alpha-dimethyl-5-(2-quinolinylmethoxy)-1H-Indole-2-propanoic acid and 4-(3-(4-(2-Methyl-imidazol-1-yl)-phenylsulfanyl)-phenyl)-tetrahydro-pyran-4-carboxylic acid amide. In one variation, the LT inhibitor is an inhibitor of FLAP. One preferred group of compounds are described herein as BAY X1005 (also known as DG-031) as well as related compounds described in Mohrs et al., U.S. Pat. No. 4,970,215, incorporated herein by reference in its entirety. In another variation, the LT inhibitor is a LTA4H inhibitor. Other preferred agents include those set forth in the Agent Table II and the LTA4H Agent list set out herein. Additional preferred agents include those described in Penning et al., Med Chem. 2002 45(16):3482-90, Penning, Curr Pharm Des. 2001, 7(3):163-79 and Penning et al., J Med Chem. 2000 43(4):721-35.

Agent Table II

| | Compound | | |
|---|---|---|---|
| Target | ID | Chemical Name | Patent/Reference |
| LTA4H | SC-57461A | 3-[methyl[3-[4- | Penning, T. D. et. al. Bioorg Med. |
| Inhibitor | | (phenylmethyl)phenoxy]- | Chem. Letters (2003), 13, 1137-1139. |
| | | propyl]amino]propionic | ibid, (2002), 12, 3383-3386 |
| | | acid | |
| LTA4H | SC-56938 | Ethyl-1-[2-[4- | Penning, T. D. et. al. Bioorg Med. |
| Inhibitor | | (phenylmethyl)phenoxy] | Chem. Letters (2003), 13, 1137-1139; |
| | | ethyl]-4-piperidine- | ibid, (2002), 12, 3383-3386. |
| | | carboxylate | US6506876A1 |
| LTA4H | RP 64966 | [4-[5-(3-Phenyl- | WO9627585 |
| Inhibitor | | propyl)thiophen-2- | |
| | | yl]butoxy]acetic acid | |
| LTA4H | SA 6541 | (R)-S-[[4- | WO9809943 |
| Inhibitor | | (dimethylamino)phenyl] | |
| | | methyl]-N-(3-mercapto- | |
| | | 2methyl-1-oxopropyl-L- | |
| | | cycteine | |
| LTB4 | Amelubant/ | Carbamic acid,((4-((3- | U.S. Pat. No. 6,576,669 |
| Receptor | BIIL-284 | ((4-(1-(4- | |
| Antagonist | | hydroxyphenyl)-1- | |
| | | methylethyl)phenoxy)methyl) | |
| | | phenyl)methoxy) | |
| | | phenyl)iminomethyl)- | |
| | | ethyl ester | |
| LTB4 | BIRZ-227 | 5-Chloro-2-[3-(4- | Journal of Organic Chemistry |
| Receptor | | methoxy-phenyl)-2- | 1998, 63: 2(326-330). |
| Antagonist | | pyridin-2-yl-pyrrolidin- | |
| | | 1-yl]-benzooxazole | |
| LTB4 | CP 195543 | 2-[(3S,4R)-3,4-dihydro- | Process: WO 98/11085 1998, |
| Receptor | | 4-hydroxy-3- | priority US 60/26372 1996; J. |
| Antagonist | | (phenylmethyl)-2H-1- | Pharamacology and Expert. |
| | | benzopyran-7-yl]-4- | Therapy, 1998, 285: 946-54 |
| | | (trifluoromethyl)benzoic | |
| | | acid | |
| LTB4 | Ebselen | 2-Phenyl- | Journal of Cerebral Blood Flow and |
| Receptor | | benzo[d]isoselenazol-3- | Metabolism 1995, July 2-6 (S162); |
| Antagonist | | one | Drugs of the Future 1995, 20: 10 |
| | | | (1057) |
| LTB4 | LTB 019; | 4-[5-(4-Carbamimidoyl- | ACS Meeting 1994, 207th: San |
| Receptor | CGS- | phenoxy)-pentyloxy]- | Diego (MEDI 003); International |
| Antagonist | 25019C | N,N-diisopropyl-3- | Congress of the Inflammation |
| | | methoxy-benzamide | Research Association 1994, |
| | | maleate | 7th: White Haven (Abs W23) |
| LTB4 | LY 210073 | 5-(2-Carboxy-ethyl)-6- | J Med Chem 1993 36 (12) 1726-1734 |
| Receptor | | [6-(4-methoxy-phenyl)- | |
| Antagonist | | hex-5-enyloxy]-9-oxo- | |
| | | 9H-xanthene-2- | |
| | | carboxylic acid | |
| LTB4 | LY 213024 | 5-(3-carboxybenzoyl)-2- | J Med Chem 1993 36 (12) 1726-1734 |
| Receptor | | (decyloxy)benzenepropanoic | |
| Antagonist | | acid | |
| LTB4 | LY 255283 | 1-[5-ethyl-2-hydroxy-4- | EP 276064 B 1990, priority US |
| Receptor | | [[6-methyl-6-(1H- | 2479 1987 |
| Antagonist | | tetrazol-5- | |
| | | yl)heptyl]oxy]phenyl] | |
| | | ethanone | |
| LTB4 | LY 264086 | 7-carboxy-3-(decyloxy)- | U.S. Pat. No. 4996230 1991, priority US |
| Receptor | | 9-oxo-9H-xanthene-4- | 481413 1990 |
| Antagonist | | propanoic acid | |
| LTB4 | LY 292728 | 7-carboxy-3-[3-[(5- | EP 743064 A 1996, priority US |
| Receptor | | ethyl-4′-fluoro-2- | 443179 1995 |
| Antagonist | | hydroxy[1,1′-biphenyl]- | |
| | | 4-yl)oxy]propoxy]-9- | |
| | | oxo-9H-xanthene-4- | |
| | | propanoic acid disodium | |
| | | salt | |
| LTB4 | LY-293111 | Benzoic acid,2-(3-(3-((5- | Proceedings of the American |
| Receptor | (VML-295) | ethyl-4′-fluoro-2- | Society for Clinical Oncology |
| Antagonist | | hydroxy(1,1′-biphenyl)- | 2002, 21: 1 (Abs 343) [LY-293111 |
| | | 4-yl)oxy)propoxy)-2- | for Cancer] |
| | | propylphenoxy)- | SCRIP World Pharmaceutical News |
| | | | 1997, 2272 (13) [for VML-295] |
| LTB4 | ONO 4057; | (E)-2-(4- | EP 405116 A 1991 |
| Receptor | LB 457 | carboxybutoxy)-6-[[6- | |
| Antagonist | | (4-methoxyphenyl)-5- | |
| | | hexenyl]oxy]benzenepropanoic | |
| | | acid | |
| LTB4 | PF 10042 | 1-[5-hydroxy-5-[8-(1- | EP 422329 B 1995, priority US |
| Receptor | | hydroxy-2-phenylethyl)- | 409630 1989 |
| Antagonist | | 2-dibenzofuranyl]-1-oxo | |
| | | pentyl]pyrrolidine | |
| LTB4 | RG-14893 | 8-Benzyloxy-4-[(methyl- | SCRIP World Pharmaceutical News |
| Receptor | | phenethyl-carbamoyl)- | 1996, 2168 (20) |
| Antagonist | | methyl]-naphthalene-2- | |
| | | carboxylic acid | |
| LTB4 | SB-201993 | 3-{6-(2-Carboxy-vinyl)- | WO-09500487 |
| Receptor | | 5-[8-(4-methoxy- | |
| Antagonist | | phenyl)-octyloxy]- | |
| | | pyridin-2- | |
| | | ylmethylsulfanylmethyl}- | |
| | | benzoic acid | |
| LTB4 | SC-52798 | 7-[3-(2- | Bioorganic and Medicinal |
| Receptor | | Cyclopropylmethyl-3- | Chemistry Letters 1994, 4: 6 (811-816); |
| Antagonist | | methoxy-4-thiazol-4-yl- | Journal of Medicinal |
| | | phenoxy)-propoxy]-8- | Chemistry 1995, 38: 6 (858-868) |
| | | propyl-chroman-2- | |
| | | carboxylic acid | |
| LTB4 | SC-53228 | 3-{7-[3-(2- | International Congress of the |
| Receptor | | Cyclopropylmethyl-3- | Inflammation Research Association |
| Antagonist | | methoxy-4- | 1994, 7th: White Haven (Abs W5) |
| | | methylcarbamoyl- | |
| | | phenoxy)-propoxy]-8- | |
| | | propyl-chroman-2-yl}- | |
| | | propionic acid | |
| LTB4 | WAY | 3-fluoro-4′-(2- | Drugs under Experimental and |
| Receptor | 121006 | quinolinylmethoxy)- | Clinical research 1991, 17: 8 (381-387) |
| Antagonist | | [1,1′-biphenyl]-4-acetic | |
| | | acid | |
| LTB4 | ZD-2138 | 3-Amino-3-(4-methoxy- | International Symposium on |
| Receptor | | tetrahydro-pyran-4-yl)- | Medicinal Chemistry |
| Antagonist | | acrylic acid 1-methyl-2- | 1994, 13th: Paris (P 197) |
| | | oxo-1,2-dihydro- | |
| | | quinolin-6-ylmethyl | |
| | | ester | |

[0026] In addition the following LTA4H inhibitors are described in USP2003/0004101A1, the teachings of which are incorporated herein by reference in their entirety:

### Additional LTA4H Agent List

[0027] 1. 1-[2-[4-(phenylmethyl)phenoxy]ethyl]-2-methyl-4-tetrazolylpieridine

[0028] 2. 1-[2-[4-(4-oxazolyl)phenoxy)phenoxy]ethyl]pyrrolidine

[0029] 3. 3-[methyl[3-[4-(2-thienylmethyl)phenoxy]propyl]amino]propionic acid

[0030] 4. methyl 3-[methyl[3-[4-(2-thienylmethyl)phenoxy]propyl]amino]propionate

[0031] 5. 3-[methyl[3-[4-(3-thienylmethyl)phenoxy]propyl]amino]propionic acid

[0032] 6. methyl-3-[methyl[3-4-(3-theinylmethyl)phenoxy]propyl]amino]propionate

[0033] 7. 3-[methyl[3-[4-(4-fluorophenoxy)phenoxy]propyl]amino]propionic acid

[0034] 8. 3-[methyl[3-[4-(4-biphenyloxy)phenoxy]propyl]amino]propionic acid

[0035] 9. N-[3-[[3-[4-(phenylmethyl)phenoxy]propyl]methylamino]propionyl]benzenesulfonamide

[0036] 10. 1-[2-[4-(phenylmethyl)phenoxy]ethyl]-2-methyl-4-(1H-tetrazol-5-yl)piperidine

[0037] 11. 1-[2-[4-(phenylmethyl)phenoxy]ethyl]-4-(1H-tetrazol-5-yl)piperidine

[0038] In some embodiments, compositions of the invention comprise a statin, and methods of the invention comprise administration of a statin. In this context, the term “statin” should be understood to refer to any of the class of inhibitors of 3-hydroxy-3-methylglutarlcoenzyme A (HMG-CoA) reductase, the enzyme that converts HMG-CoA to the cholesterol precursor mevalonic acid. Numerous compounds with high specificity for this enzyme have been developed and approved for human therapy. Compositions of the invention may comprise a statin that is listed in Agent Table III herein, such as rovuvastatin (also known visastatin), fluvastatin, atorvastatin, lovastatin (also known as mevolin), simvastatin, pravastatin, pitavastatin, mevastatin, crevastatin, ML-236A, ML-236B, MBV-530A and MB-530B.

[0039] References to agents should be understood to include pharmaceutically acceptable salts, acids, bases, esters, pro-drugs, metabolites, and other common formulation variants of the agents.

[0040] An increasing body of emerging evidence identifies serum CRP as a marker for cardiovascular morbidity/mortality, and correlates reductions in serum CRP to better clinical outcomes. (See, e.g., Ridker et al., N. Engl. J. Med. 352(1): 20-28 (2005); Nissen et al., N. Engl. J. Med. 352(1): 29-38 (2005); and Pearson et al., Circulation 107: 499-511 (2003).) Serum CRP in excess of 3.0 mg/L is considered high risk; from 1.0 to 3.0 average risk; and below 1 mg/L low risk. (Pearson et al.) Compositions and methods of the invention provide tools for reducing serum CRP. Reductions in CRP can be measured on a concentration basis, where compositions and methods that achieve CRP below 3.0 mg/L are preferred; with still more preferred targets of 2.75 mg/L, 2.5 mg/L, 2.25 mg/L, 2.0 mg/L, 1.75 mg/L, 1.5 mg/L, 1.25 mg/L, 1.0 mg/L, 0.75 mg/L, and 0.5 mg/L. Reductions in CRP also can be measured on a percentage basis, where clinical effectiveness is evaluated as a percentage reduction in CRP in a patient compared to no drug therapy or compared to single drug therapy. Depending on the initial CRP measurement, compositions and methods that reduce CRP anywhere from 10%-90% or more are contemplated, e.g., reductions of 10%, 20%, 25%, 30%, 40%, 50%, 60%, 65%, 70%, 75%, 80%, or any target in between these values.

[0041] The invention also contemplates methods of reducing MPO and method of monitoring MPO levels. Reductions in MPO can be measured on a concentration basis, where compositions and methods that reduce MPO level relative to the quartile distribution of MPO in the normal population (i.e., from 4^{th} quartile to 3^{rd} or from 3^{rd} to 2^{nd}) are preferred. Reductions in MPO also can be measured on a percentage basis, where clinical effectiveness is evaluated as a percentage reduction in MPO in a patient compared to no drug therapy or compared to single drug therapy. Depending on the initial MPO measurement, compositions and methods that reduce MPO anywhere from 10%-90% or more are contemplated, e.g., reductions of 10%, 20%, 25%, 30%, 40%, 50%, 60%, 65%, 70%, 75%, 80%, or any target in between these values.

[0042] In some variations of the invention, the composition of the invention includes the leukotriene synthesis inhibitor in an amount effective to reduce serum C-reactive protein (CRP) in a human subject. In some variations, the composition of the invention includes the statin in an amount effective to reduce serum low density lipoprotein cholesterol (LDL) and reduce serum CRP in a human subject. In at least one preliminary and short term study desribed herein, human subjects that already enjoyed the CRP-lowering benefits of statin therapy were administered the LT inhibitor BAY-X1005, and significant further reductions in CRP were detected. Combination therapy of a longer duration may result in further CRP reduction than the 20-30% effect observed in the short term study.

[0043] In an embodiment of the invention, the compositions comprise a leukotriene synthesis inhibitor in an amount effective to reduce serum CRP in a human subject and a statin. In another embodiment, the compositions comprise a statin in an amout effective to reduce serum LDL-C in a human subject and a leukotriene synthesis inhibitor. The invention also encompasses compositions comprising a leukotriene synthesis inhbitor and a statin in amounts effective to synergistically reduce CRP in a human subject.

[0044] In one variation, the leukotriene inhibitor and the statin are included in the composition of the invention in amounts effective to synergistically reduce serum C-reactive protein in a human subject.

[0045] For practice of the invention with BAY-X1005, doses of 50-750 mg per day for adult human patients are contemplated. Doses of 100-500 mg, from one to five times per day, is contemplated. Doses of 250-375 mg, from one to three times per day, is preferred.

[0046] Dosing for clinically approved statins have been developed and published by the manufacturers. In a preferred embodiment, the statin is co-formulated with the LT inhibitor in a pill or capsule for administrations 1-4 times per day.

[0047] The invention provides for methods of using these compositions to reduce risk factors for cardiovascular diseases such as for MI, ACS, stroke, or PAOD. In one method, a composition comprising a leukotriene synthesis inhibitor and a statin is administered to a human subject exhibiting one or more risk factors for MI, ACS, stroke or PAOD, wherein the composition is administered in an amount effective to reduce at least one risk factor for MI, ACS, stroke or PAOD. Preferably, the risk factor is elevated serum LDL-C or an elevated inflammatory marker such as CRP or serum amyloid A. In a highly preferred embodiment, LDL-C and CRP are both reduced clinically significant amounts, where a clinically significant amount is an amount that correlates with a statistically significant measurable reduction in risk for an adverse cardiovascular event, when analyzed in a population, e.g., in a clinical study.

[0048] The invention also provides for method of using these compounds to reduce CRP in human subject. In one variation, the invention is a method of reducing C reactive protein (CRP) in a human subject, comprising administering to a human in need of treatment to reduce CRP a composition of the invention containing the LT inhibitor and the statin as described above, in an amount effective to reduce serum C reactive protein in the human subject. The identification of a human in need of treatment for CRP reduction can be based on a variety of factors described herein, including genetic factors, CRP measurements, measurements of other inflammatory markers, and measurements of non-genetic and non-inflammatory markers for risk of MI. In one variation, the method includes selecting for the administering step a human subject at risk for a disease or condition selected from the group consisting of myocardial infarction, acute coronary syndrome, stroke, or peripheral arterial occlusive disease. Thus, the invention provides a method that comprises selecting a human subject at risk for MI, ACS, stroke or PAOD and administering to the subject a composition comprising a leukotriene synthesis inhibitor and a statin wherein the composition is in an amount effective to reduce serum CRP in a human subject. The method may further comprise the step of measuring serum CRP in the human subject to monitor therapeutic efficacy of the composition, wherein a decrease in serum CRP following the administering of the composition indicates therapeutic efficacy.

[0049] In still another variation, the monitoring of risk factors and/or toxicity is used to adjust dose or dosing. For example, dose or dosing of a statin or a leukotriene synthesis inhibitor is increased if serum CRP and/or LDL and/or serum or urinary leukotriene measurements do not decrease to a target level, such as a level equivalent to the bottom 50 percentile, 40 percentile, 30 percentile, 20 percentile, 10 percentile, 1 percentile of a population, or other target percentile in between these exemplary targets. As described above, monitoring also can be used to adjust dosing to achieve a target level of serum CRP, or to achieve a target percentage reduction in CRP for a particular human subject.

[0050] The monitoring may involve parameters in addition to CRP. A benefit of the statin for many human subjects will be the reduction in serum LDL, and methods of the invention include administering the composition of the invention in an amount effective to reduce serum LDL and serum leukotrienes in the human subject. In this embodiment, serum LDL may be monitored. Other markers described herein, including serum amyloid A nad myeloperoxidase, may be monitored.

[0051] In certain embodiments of the invention, the individual or human subject selected for treatment is an individual who has at least one risk factor, such as an at-risk haplotype for myocardial infarction, stroke or PAOD; an at-risk haplotype in the FLAP gene; a polymorphism in a FLAP nucleic acid; an at-risk polymorphism in the 5-LO gene promoter. The invention provides for methods of selecting a human subject susceptible to MI comprising determining a FLAP genotype or haplotype of a human subject, and selecting for treatment a human subject with a FLAP genotype or haplotype that correlates with an increased risk of MI. The methods of the invention include selecting a human subject with the presence of at least one at-risk haplotype within or near the FLAP gene such as a haplotype shown in Table 14; a haplotype shown in Table 15; a haplotype shown in Table 19; haplotype B4; haplotype B5; haplotype B6; haplotype A4; haplotype A5; haplotype HapB, haplotype HapC1, haplotype HapC2, haplotype HapC3, haplotype HapC4-A and haplotype HapC4-B.

[0052] The methods of the invention also include selecting a human subject for treatment, wherein the presence in said subject of a haplotype comprising marker SG13S106 (SNP DG00AAHII) (SEQ ID NO: 1, position 176579), allele G, identifies the subject as having a susceptibility to MI; the presence of a haplotype comprised of markers SG13S99 (DG00AAFIU), allele T (SEQ ID NO: 1, position 138551); SG13S377 (DG00AAJFF) (SEQ ID NO: 1, position 169965), allele G; SG13S106 [SNP DG00AAHII] (SEQ ID NO: 1, position 176579), allele G; SG13S32 (SEQ ID NO: 1, position 198547), allele A; and SG13S35 (SEQ ID NO: 1, position 206117), allele G identifies the subject as having a susceptibility to MI; the presence in said subject of a haplotype comprised of markers: SG13S375 (SEQ ID NO: 1, position 164874), allele T; SG13S25 (SEQ ID NO: 1, position 165553), allele G; SG13S32 (SEQ ID NO: 1, position 176579), allele A; and SG13S106 (SEQ ID NO: 1, position 198547), allele G or A identifies the subject as having a susceptibility to MI, the presence in said subject of a haplotype comprised of marker SG13S375(SNP DG00AAJFC) (SEQ ID NO: 1, position 164874), allele T; and SG13S25 (SEQ ID NO: 1, position 165553), allele G, identified the subject as having a susceptibility to MI; the presence in said subject of a haplotype comprised of marker SG13S375(SNP DG00AAJFC) (SEQ ID NO: 1, position 164874), allele T; and SG13S25 (SEQ ID NO: 1, position 165553), allele G, and SG13S32 (SEQ ID NO: 1, position 198547) identified the subject as having a susceptibility to MI, the presence in said subject of a haplotype comprised of marker SG13S106 (SNP DG00AAHII) (SEQ ID NO: 1, position 176579), allele G, SG13S30 (SEQ ID NO: 1, position 193840), allele G; and SG13S42 (SEQ ID NO: 1, position 203877), allele A, identifies the subject as having a susceptibility to MI, the presence in said subject of a haplotype comprised of markers: SG13S377 (SEQ ID NO: 1, position 169965), allele A; SG13S114 (SEQ ID NO: 1, position 178096), allele A; SG13S41 (SEQ ID NO: 1, position 202045), allele A; and SG13S35 (SEQ ID NO: 1, position 206117), allele G, identifies the subject as having a susceptibility to MI.

[0053] In another embodiment, the invention provides for a method of selecting a human subject susceptible to MI comprising analyzing nucleic acid of a human subject for the presenece or absence of at least one FLAP polymorphism that correlates with a susceptibility to MI. FLAP polymorphisms that that correlate to susceptibility to MI inlcude SG13S377 (SEQ ID NO: 1, position 169965), allele A; SG13S114 (SEQ ID NO: 1, position 178096), allele A; SG13S41 (SEQ ID NO: 1, position 202045), allele A; and SG13S35 (SEQ ID NO: 1, position 206117), allele G. Additional FLAP polymorphisms that that correlate to a susceptibility to MI include SG13S375 (SEQ ID NO: 1, position 164874), allele T, SG13S25 (SEQ ID NO: 1, position 165553), allele G; SG13S32 (SEQ ID NO: 1, position 176579), allele A; and SG13S106 (SEQ ID NO: 1, position 198547), allele G or A. The methods may further comprise selecting a subject with the presence of at least one FLAP polymorphism and with the presence of elevated CRP or MPO.

[0054] An another embodiment, the invention provides for methods of prophylaxis therapy for myocardial infarction (MI) comprising analyzing nucleic acid of a human subject for the presence and absence of a FLAP haplotype, wherein the haplotype is comprised of markers: SG13S377 (SEQ ID NO: 1, position 169965), allele A; SG13S114 (SEQ ID NO: 1, position 178096), allele A; SG13S41 (SEQ ID NO: 1, position 202045), allele A; and SG13S35 (SEQ ID NO: 1, position 206117), allele G, and selecting for treatment a human subject having nucleic acid with the presence of the FLAP haplotype. This method futher comprises administering to the subject a composition comprising a therapeutically effective amount of an MI therapeutic agent that inhibits leukotriene synthesis in vivo, wherein the MI therapeutic agent inhibits leukotriene synthesis by inhibiting the activity of at least one protein selected from 5-Lipoxygenase activating protein (FLAP) and 5-lipoxygenase (5-LO).

[0055] In one embodiment, the invention provides for methods of decreasing risk of a subsequent myocardial infarction in an individual who has had at least one myocardial infarction, comprising administering a therapeutically effective amount of an MI therapeutic agent to the individual, wherein the MI therapeutic agent inhibits leukotriene synthesis by inhibiting the activity of at least one protein selected from 5-Lipoxygenase activating protein (FLAP) and 5-lipoxygenase (5-LO) and monitoring myeloperoxidase (MPO) in the individual before and during administration of the therapeutic agent, wherein the therapeutic agent is administered in an amount effective to reduce the leukotriene level in a subject.

[0056] In another embodiment, the invention provides for methods of screening a human subject for susceptibility for MI comprising analyzing nucleic acid of a human subject for the presence and absence of the FLAP haplotype comprised of markers: SG13S377 (SEQ ID NO: 1, position 169965), allele A; SG13S114 (SEQ ID NO: 1, position 178096), allele A; SG13S41 (SEQ ID NO: 1, position 202045), allele A; and SG13S35 (SEQ ID NO: 1, position 206117), allele G, and identifying the subject as having a susceptibility to MI, wherein the presence of the FLAP haplotype correlates with an increased risk of MI.

[0057] The individuals or human subjects selected for treatment may have at least one family or medical history risk factor such as diabetes; hypertension; hypercholesterolemia; elevated triglycerides; elevated lp(a); obesity; ankle/brachial index (ABI) less than 0.9; a past or current smoker; transient ischemic attack; transient monocular blindness; carotid endarterectomy; asymptomatic carotid stenosis; claudicatioin; limb ischemia leading to gangrene, ulceration or amputation; a vascular or peripheral artery revascularization graft; increased serum LDL cholesterol and/or decreased HDL cholesterol; serum total cholesterol >200 mg/dl, increased leukotriene synthesis; and/or at least one previous myocardial infarction, ACS, stable angina, previous transient ischemic attack, transient monocular blindness, or stroke, asymptomatic carotid stenosis or carotid endarterectomy, atherosclerosis, requires treatment for restoration of coronary artery blood flow (e.g., angioplasty, stent, revascularization procedure).

[0058] In addition, the individuals or human subjects selected for treatment may have an elevated inflammatory marker, e.g., a marker such as C-reactive protein (CRP), serum amyloid A, fibrinogen, a leukotriene, a leukotriene metabolite, interleukin-6, tissue necrosis factor-alpha, a soluble vascular cell adhesion molecule (sVCAM), a soluble intervascular adhesion molecule (sICAM), E-selectin, matrix metalloprotease type-1, matrix metalloprotease type-2, matrix metalloprotease type-3, matrix metalloprotease type-9, myeloperoxidase (MPO), and N-tyrosine). The invention provides for methods of prophylaxis therapy for MI comprising administering a MI therapeutic agent in an amount effective to reduce the elevated serum level of at least one elevated inflammatory markers.

[0059] In a particular embodiment, the invention provides for methods of prophylaxis for myocardial infarction (MI) comprising administering to a subject in need of prophylaxis for myocardial infraction a composition comprising a therapeutically effective amount of an MI therapeutic agent that inhibits leukotriene synthesis in vivo, and monitoring myeloperoxidase (MPO) level in the human subject before and during the prophylaxis treatment, wherein the MI therapeutic agent is administered in an amount effective to reduce the MPO level in a subject.

[0060] The invention also provides for methods of screening a human subject for risk of developing myocardial infarction, comprising contacting a blood sample from the human subject with a calcium ionophore to stimulate production of a leukotriene; and measuring production of a leukotriene in the blood sample after the contacting step, wherein elevated leukotriene production compared to a control correlates with increased risk of developing myocardial infarction (MI). The control in these methods may be a human of the same sex as the subject selected for treatment or may be a human age matched to the subject selected for treatment.

[0061] Human subjects that already are treated with statins can enjoy the benefit of the present invention if the subjects therapy is modified to include an LT antagonist. Thus, in still another embodiment, the invention is a method of reducing C reactive protein (CRP) in a human subject, comprising: selecting a human subject that receives statin therapy to reduce serum LDL, wherein the statin therapy optionally reduces serum CRP in the human subject; and administering to the human subject a leukotriene synthesis antagonist, in an amount effective to further reduce CRP in the human subject.

[0062] In still another embodiment, the invention is a method of reducing C reactive protein (CRP) in a human subject, comprising: identifying a human subject in need of treatment to reduce serum CRP; administering to the human subject a composition comprising a statin; and administering to the human subject a composition comprising a leukotriene synthesis inhibitor, wherein the statin and the leukotrience synthesis inhibitor are administered in amounts effective to reduce serum CRP in the human subject. The statin and the LT inhibitor can be simultaneously administered as a single composition, as described above; can be simultaneously administered as separate compositions; or can be sequentially administered. Depending on the dosing schedule, the daily administration regimen may include simultaneous administration at some times and separate administration at other times, e.g., if one agent is administered twice daily and another three times daily.

[0063] In certain embodiments of the invention, the individual or human subject selected for treatment is an individual who has at least one risk factor, such as an at-risk haplotype for myocardial infarction, stroke or PAOD; an at-risk haplotype in the FLAP gene; a polymorphism in a FLAP nucleic acid; an at-risk polymorphism in the 5-LO gene promoter, diabetes; hypertension; hypercholesterolemia; elevated triglycerides; elevated lp(a); obesity; ankle/brachial index (ABI) less than 0.9; a past or current smoker; transient ischemic attack; transient monocular blindness; carotid endarterectomy; asymptomatic carotid stenosis; claudicatioin; limb ischemia leading to gangrene, ulceration or amputation; a vascular or peripheral artery revascularization graft; an elevated inflammatory marker (e.g., a marker such as C-reactive protein (CRP), serum amyloid A, fibrinogen, a leukotriene, a leukotriene metabolite, interleukin-6, tissue necrosis factor-alpha, a soluble vascular cell adhesion molecule (sVCAM), a soluble intervascular adhesion molecule (sICAM), E-selectin, matrix metalloprotease type-1, matrix metalloprotease type-2, matrix metalloprotease type-3, matrix metalloprotease type-9, myeloperoxidase (MPO), and N-tyrosine); increased LDL cholesterol and/or decreased HDL cholesterol; increased leukotriene synthesis; and/or at least one previous myocardial infarction, ACS, stable angina, previous transient ischemic attack, transient monocular blindness, or stroke, asymptomatic carotid stenosis or carotid endarterectomy, atherosclerosis, requires treatment for restoration of coronary artery blood flow (e.g., angioplasty, stent, revascularization procedure).

[0064] The invention additionally pertains to methods of assessing an individual for an increased risk of MI, ACS, atherosclerosis, stroke, or PAOD, by assessing or monitoring a level of a leukotriene metabolite (e.g., LTE4, LTD4, LTB4) in the individual (e.g., in a sample of blood, serum, plasma or urine). An individual or human subject selected for treatment may have an elevated measurement of a leukotriene or leukotriene metabolite, such as LTC4, LTD4, LTB4 and LTE4. The level of leukotrienes and leukotriene metabolites may be measured in serum, plasma, blood or urine in the individual. An increased level of leukotriene metabolite is indicative of an increased risk. The invention also encompasses methods of assessing an individual for an increased risk of MI, ACS, atherosclerosis, stroke, transient ischemic attack, transient monocular blindness, asymptomatic carotid stenosis, PAOD, claudication, or limb ischemia, by stimulating production of a leukotriene or a leukotriene metabolite in a test sample from the individual (e.g., a sample comprising neutrophils), using a calcium ionophore, and comparing the level of the leukotriene or leukotriene metabolite with a control level. A level of production of the leukotriene or leukotriene metabolite that is significantly greater than the control level, is indicative of increased risk.

[0065] The invention further pertains to methods of assessing response to treatment with a leukotriene synthesis inhibitor, by assessing or monitoring a level of a leukotriene or leukotriene metabolite in the individual before treatment, and comparing the level to a level of the leukotriene or leukotriene metabolite assessed during or after treatment. A level that is significantly lower during or after treatment, than before treatment, is indicative of efficacy of the treatment with the leukotriene synthesis inhibitor. The level of leukotriene may be monitored in serum, plasma, blood or urine collected from the subject before, during and after treatment. The invention additionally pertains to methods of assessing response to treatment with a leukotriene synthesis inhibitor, by stimulating production of a leukotriene or a leukotriene metabolite in a first test sample from the individual (e.g., a sample comprising neutrophils) before treatment, using a calcium ionophore, and comparing the level of the leukotriene or leukotriene metabolite with a level of production of the leukotriene or leukotriene in a second test sample from the individual, during or after treatment. A level of production of the leukotriene or leukotriene metabolite in the second test sample that is significantly lower than the level in the first test sample, is indicative of efficacy of the treatment, for example, the treatment or therapeutic agent reduces the leukotriene level in the subject to the medial level of leukotrienes in human subjects in the general population or lower than that medial level.

[0066] Similarly, the invention encompasses methods of assessing response to treatment with a leukotriene synthesis inhibitor, by assessing or monitoring a level of an inflammatory marker in the individual before treatment, and during or after treatment. A level of the inflammatory marker during or after treatment, that is significantly lower than the level of inflammatory marker before treatment, is indicative of efficacy of the treatment.

[0067] To determine the effectiveness of compositions of the present invention comprising a statin, total cholesterol, LDL-C and/or triglycerides may be assessed from measurements of risk factor markers in the serum of a human subject administered the composition. A level of serum total cholesterol, LDL-C and/or triglycerides during or after treatment, that is significantly lower than the level of total cholesterol, LDL-C and/or triglycerides before treatment is indicative of the efficacy of the treatment.

[0068] The invention also pertains to use of leukotriene synthesis inhibitors for the manufacture of a medicament for the treatment of MI, ACS, stroke, PAOD, and/or atherosclerosis, as described herein, as well as for the manufacture of a medicament for the reduction of leukotriene synthesis.

### BRIEF DESCRIPTION OF THE DRAWINGS

[0069] The foregoing and other objects, features and advantages of the invention will be apparent from the following more particular description of preferred embodiments of the invention.

[0070] FIG. 1 shows the results from a haplotype association case-control analysis of 437 female MI patients versus 721 controls using combinations 4 and 5 microsatellite markers to define the test haplotypes. The p-value of the association is plotted on the y-axis and position of markers on the x-axis. Only haplotypes that show association with a p-value <10⁻⁵ are shown in the figure. The most significant microsatellite marker haplotype association is found using markers DG13S1103, DG13S166, DG13S1287, DG13S1061 and DG13S301, with alleles 4, 0, 2, 14 and 3, respectively (p-value of 1.02×10⁻⁷). Carrier frequency of the haplotype is 7.3% in female MI patients and 0.3% in controls. The segment that is common to all the haplotypes shown in the figure includes only one gene, FLAP.

[0071] FIG. 2 shows the alleles of the markers defining the most significant microsatellite marker haplotypes. The segment defined with a black square is common to all the of most significantly associated haplotypes. The FLAP nucleic acid is located between makers DG13S166 and D13S1238. Two marker haplotype involving alleles 0 and −2 for markers DG13S166 and D13S1238, respectively, is found in excess in patients. Carrier frequency of this haploype is 27% in patients and 15.4% in controls (p-value 1×10⁻³). Therefore, association analysis confirms that the most tightly MI-associated gene within the linkage peak is FLAP.

[0072] FIG. 3 shows the relative location of key SNPs and exons of the ALOX5AP/FLAP gene (exons shown in vertical rectangles). Haplotype length varies between 33 to 68 kb.

[0073] FIG. 4 shows a significant positive correlation between serum LTE4 levels and serum CRP levels.

[0074] FIG. 5 depicts LTB4 production of ionomycin stimulated neutrophils from MI patients (n=41) and controls (n=35). The log-transformed (mean+SD) values measured at 15 and 30 minutes of stimulated cells are shown. (7.1) LTB4 production in MI patients and controls. The difference in the mean values between patients and the controls is tested using a two-sample t-test of the log-transformed values. (7.2) LTB4 production in MI male carriers and non-carriers of haplotype A4. Mean values of controls are included for comparison. Of note, males with the haplotype A4 produce the highest amounts of LTB4 (p<0.005 compared to controls). (7.3). Schematic representation of the 5-LO pathway with leukotriene bioactive products.

[0075] FIG. 6 shows a schematic view of the chromosome 13 linkage region showing the FLAP gene. (9.1) The linkage scan for female MI patients and the one LOD drop region that includes the FLAP gene; (9.2) Microsatellite association for all MI patients: single marker association and two, three, four and five marker haplotype association. The arrows indicate the location of the most significant haplotype association across the FLAP gene in males and females. (9.3) The FLAP gene structure, with exons shown as cylinders, and the location of all the SNPs typed in the region (vertical lines). The vertical lines indicate the position of the microsatellites (shown in 9.2) and SNPs (shown in 9.3) used in the analysis.

[0076] FIG. 7 shows a linkage scan using framework microsatellite markers on chromosome 13 for male patients with ischemic stroke or TIA (n=342 in 164 families at 6 meiosis). The LOD score is expressed on the y axis and the distance from the pter in Kosambi cM on the x axis.

[0077] FIG. 8 shows a pairwise linkage disequilibrium (LD) between SNPs in a 60 kb region encompassing FLAP. The markers are plotted equidistantly. Two measures of LD are shown: D′ in the upper left triangle and P values in the lower right triangle. Shaded lines indicate the positions of the exons of FLAP and the stars indicate the location of the markers of the at-risk haplotype A4. Scales for the LD strength are provided for both measures to the right.

[0078] FIG. 9 provides a schematic of the clinical trial schedule. This figure shows that at Visit 2 (on Day 1 of study) subjects were randomised into each of the three arms and to either placebo or active drug within each arm. A 2-week washout period separated the 4-week treatment periods. Cross-over was performed at week 6.

[0079] FIG. 10 shows the analysis of carry-over effect for CRP and SAA (on log-scale).

[0080] FIG. 11 shows the results of the first step of the linkage analysis: multipoint non-parametric LOD scores for a framework marker map on chromosome 12. A LOD score suggestive of linkage of 1.95 was found at marker D12S2081.

[0081] FIG. 12 shows the results of the second step of the linkage analysis: multipoint non-parametric LOD scores for the families after adding 20 fine mapping markers to the candidate region. The inclusion of additional microsatellite markers increased the information on sharing by decent from 0.8 to 0.9, around the markers that gave the highest LOD scores.

[0082] FIG. 13 shows LD and haplotypes in the LTA4H region. FIG. 13a shows a pairwise LD between the 10 genotyped SNPs in a 48-kb region encompassing LTA4H. The markers are plotted equidistantly. Two measures of LD are shown: D′ in the upper left triangle and R²-values in the lower right triangle. Scales for both measures of LD are shown on the right. Colored lines indicate the positions of the first exon and the last exon of LTA4H (NM_{—}000895). FIG. 1 depicts are all haplotypes found in Icelandic population controls that have allelic frequency greater than 1%. The haplotype showing strongest association to MI in Iceland (HapK) is bold.

### DETAILED DESCRIPTION OF THE INVENTION

[0083] Extensive genealogical information has been combined with powerful gene sharing methods to map a gene on chromosome 13q12-13 that is associated with myocardial infarction. A genome wide search for susceptibility genes for MI, using a framework map of 1000 microsatellite markers, revealed a locus suggestive of linkage on 13q12-13. Sixty families with 159 female MI patients that clustered within and including 6 meiotic events were used in linkage analysis. At first, only female MI patients were used in the linkage analysis in an effort to enrich for patients with stronger genetic factors contributing to their risk for MI. The epidemiological study of a population-based sample of Icelandic MI patients had previously suggested that the genetic factors for MI might be stronger for females than males, as the relative risk for siblings of female MI patients was significantly higher than the relative risk for siblings of male probands (1.59 (CI 1.47-1.73) vs. 1.35 (CI 1.28-1.42)) (unpublished data). The highest LOD score (2.5) was found at marker D13S289. The LOD score results for the families remained the same after adding 14 microsatellite markers to the candidate region. The inclusion of the additional markers increased the information on sharing by descent from 0.7 to 0.8, around the markers that gave the highest LOD scores. This linkage analysis mapped a gene contributing to MI to chromosome 13q12-13.

[0084] The candidate MI locus on chromosome 13q12-13 was then finely mapped with microsatellite markers. Patients with myocardial infarction and controls were initially genotyped with microsatellite markers with an average spacing between markers of less than 100 kb over the 12 Mb candidate region. Initial haplotype association analysis that included all genotyped microsatellite markers across the MI candidate locus, resulted in several extended haplotypes composed of 4 and 5 microsatellite markers that were significantly associated with female MI (see, e.g., Tables 14 and 15 below). A region common to all these extended haplotypes, is defined by markers DG13S166 and D13S1238. This region includes only one gene, the FLAP nucleic acid sequence. The two marker haplotype involving alleles 0 and −2 for markers DG13S166 and D13S1238, respectively, was found in excess in patients. Specific variants of the gene were then sought that were associated with MI.

[0085] In order to screen for SNPs in the FLAP gene, the whole gene was sequenced, both exons and introns. Initially, 9 SNPs identified within the gene were genotyped in patients and controls. Additional microsatellite markers close to or within the FLAP gene were also genotyped in all patients and controls. Five publicly known SNPs that are located within a 200 kb distance 5′ to the FLAP gene were also genotyped in patients and controls. Haplotype association analysis in this case-control study including these additional markers showed several different variants of the same haplotype that were all significantly associated with female MI (see, e.g., Table 8). Table 9 shows two haplotypes that are representative of these female MI risk haplotypes which are referred to herein as the female MI “at risk” haplotypes. The relative risk for male MI patients that had the female MI-“at risk” haplotype was increased (see, e.g., Table 9), indicating that the female MI-“at risk” haplotype also increased the risk of having an MI in males. These results further strengthened the hypothesis that the FLAP gene was an MI susceptibility gene.

### SNP Haplotype Association to MI, and Subsequently to Stroke and PAOD

[0086] In an effort to identify haplotypes involving only SNP markers that associate with MI, additional SNPs were identified by sequencing the FLAP gene and the region flanking the gene. Currently, a total of 45 SNPs in 1343 patients and 624 unrelated controls have been genotyped. Two correlated series of SNP haplotypes have been observed in excess in patients, denoted as A and B in Table 7. The length of the haplotypes varies between 33 and 69 kb, and the haplotypes cover one or two blocks of linkage disequilibrium. Both series of haplotypes (HapA and HapB) contain the common allele G of the SNP SG13S25. HapC2, identified in the analysis of the North American cohort (see Example 13), also contains the allele G of the SNP SG13S25. All haplotypes in the A series contain the SNP SG13S114, while all haplotypes in the B series contain the SNP SG13S106. In the B series, the haplotypes B4, B5, and B6 have a relative risk (RR) greater than 2 and with allelic frequencies above 10%. The haplotypes in the A series have slightly lower RR and lower p-values, but higher frequency (15-16%). The haplotypes in series B and A are strongly correlated, i.e., the haplotypes in B define a subset of the haplotypes in A. Hence, haplotypes in series B are more specific than A. However, haplotypes in series A are more sensitive, i.e., they capture more individuals with the putative mutation, as is observed in the population attributable risk which is less for B than for A. Furthermore, these haplotypes show similar risk ratios and allelic frequencies for early-onset patients (defined as onset of first MI before the age of 55) and for both genders. In addition, analyzing various groups of patients with known risk factors, such as hypertension, high cholesterol, smoking and diabetes, does not reveal any significant correlation with these haplotypes, suggesting that the haplotypes in the FLAP gene represent an independent genetic susceptibility factor for MI.

[0087] Analysis of the North American cohort (described in Example 12) identified another haplotype C which is associated with MI as demonstrated in Table 33 (Example 13). HapC is defined by the T allele of marker SG13S375. There are 4 additional variations of the HapC haplotype which comprise SNPs in addition to the T allele of SG13S375. HapC2 is defined by allele T of the SNPs SG13S375 and allele G of the SNP SG13S25. HapC3 is defined by allele T of the SNPs SG13S375 and allele G of the SNP SG13S25 and allele A of SNP SG13S32. HapC4-A is defined by allele A of the SNP SG13S106 in addition to allele T of the SNPs SG13S375, allele G of the SNP SG13S25 and allele A of SNP SG13S32. HapC4-B is defined by allele G of the SNP SG13S106 in addition to allele T of the SNPs SG13S375, allele G of the SNP SG13S25 and allele A of SNP SG13S32. HapC4-A and HapC-4B correlate with HapA and HapB.

[0088] Because stroke and PAOD are diseases that are closely related to MI (all occur on the basis of atherosclerosis), the SNP haplotype in the FLAP gene that confers risk to MI was assessed to determine whether it also conferred risk of stroke and/or PAOD. Table 20 shows that haplotype A4 increases the risk of having a stroke to a similar extent as it increases the risk of having an MI. Table 34 demonstrates that HapA is associated with risk of stroke in a Scottish chort (Example 14). Although not as significantly, haplotype A4 also confers risk of developing PAOD.

[0089] The FLAP nucleic acid encodes a 5-lipoxygenase activating protein, which, in combination with 5-lipoxygenase (5-LO), is required for leukotriene synthesis. FLAP acts coordinately with 5-LO to catalyze the first step in the synthesis of leukotrienes from arachidonic acid. It catalyzes the conversion of arachidonic acid to 5(S)-hydroperoxy-6-trans-8,11,14-cis-eicosatetraenoic acid (5-HPETE), and further to the allylic epoxide 5 (S)-trans7,9 trans 11,14-cis-eicosatetraenoic acid (leukotriene A4, LTA4).

[0090] The leukotrienes are a family of highly potent biological mediators of inflammatory processes produced primarily by bone marrow derived leukocytes such as monocytes, macrophages, and neurophils. Both FLAP and 5-LO are detected within atherosclerosis lesions (Proc Natl Acad Sci U S A. 2003 Feb. 4;100(3):1238-43.), indicating that the vessel itself can be a source of leukotrienes. It was found at first that the MI-risk FLAP haplotype was associated with higher serum leukotriene levels. Increased production of leukotriene in individuals with pre-existing atherosclerosis lesions may lead to plaque instability or friability of the fibrous cap leading to local thrombotic events. If this occurs in coronary artery arteries it leads to MI or unstable angina. If it occurs in the cerebrovasculature it leads to stroke or transient ischemic attack. If it occurs in large arteries to the limbs, it causes or exacerbates limb ischemia in persons with peripheral arterial occlusive disease (PAOD). Therefore, those with genetically influenced predisposition to produce higher leukotriene levels have higher risk for events due to pre-existing atherosclerosis such as MI.

[0091] Inhibitors of FLAP function impede translocation of 5-LO from the cytoplasm to the cell membrane and inhibit activation of 5-LO and thereby decrease leukotriene synthesis.

[0092] As a result of these discoveries, methods are now available for the treatment of myocardial infarction (MI) and acute coronary syndrome (ACS), as well as stroke and PAOD, through the use of leukotriene inhibitors, such as agents that inhibit leukotriene biosynthesis or antagonize signaling through leukotriene receptors. The term, “treatment” as used herein, refers not only to ameliorating symptoms associated with the disease or condition, but also preventing or delaying the onset of the disease or condition; preventing or delaying the occurrence of a second episode of the disease or condition; and/or also lessening the severity or frequency of symptoms of the disease or condition. In the case of atherosclerosis, “treatment” also refers to a minimization or reversal of the development of plaques. Methods are additionally available for assessing an individual's risk for MI, ACS, stroke or PAOD. In a preferred embodiment, the individual to be treated is an individual who is susceptible (at increased risk) for MI, ACS, stroke or PAOD, such as an individual who is in one of the representative target populations described herein.

### Representative Target Populations

[0093] In one embodiment of the invention, an individual who is at risk for MI, ACS, stroke or PAOD is an individual who has an at-risk haplotype in FLAP, as described herein. In one embodiment, a haplotype associated with a susceptibility to myocardial infarction, ACS, stroke or PAOD comprises markers SG13S99, SG13S25, SG13S377, SG13S106, SG13S32 and SG13S35 at the 13q12-13 locus. In another embodiment, a haplotype associated with a susceptibility to myocardial infarction, ACS, stroke or PAOD comprises markers SG13S99, SG13S25, SG13S106, SG13S30 and SG13S42 at the 13q12 locus. In a third embodiment, a haplotype associated with a susceptibility to myocardial infarction, ACS, stroke or PAOD comprises markers SG13S25, SG13S106, SG13S30 and SG13S42 at the 13q12-13 locus. In a fourth embodiment, a haplotype associated with a susceptibility to myocardial infarction, ACS, stroke or PAOD comprises markers SG13S99, SG13S25, SG13S114, SG13S89 and SG13S32 at the 13q12-13 locus. In a fifth embodiment, a haplotype associated with a susceptibility to myocardial infarction, ACS, stroke or PAOD comprises markers SG13S25, SG13S114, SG13S89 and SG13S32 at the 13q12-13 locus. In another embodiment, a haplotype associated with a susceptibility to myocardial infarction, ACS, stroke or PAOD comprises marker SG13S375 at the 13q12-13 locus. In another embodiment, a haplotype associated with a susceptibility to myocardial infarction, ACS, stroke or PAOD comprises markers SG13S25 and SG13S375 at the 13q12-13 locus. In another embodiment, a haplotype associated with a susceptibility to myocardial infarction, ACS, stroke or PAOD comprises markers SG13S25, SG13S375 and SG13S32 at the 13q12-13 locus. In an additional embodiment, a haplotype associated with a susceptibility to myocardial infarction, ACS, stroke or PAOD comprises markers SG13S25, SG13S375, SG13S32 and SG13S106 at the 13q12-13 locus. Additional haplotypes associated with a susceptibility to myocardial infarction, ACS, stroke or PAOD include the haplotypes shown in Tables 4, 8, 9, 14, 15, 17 and 19, as well as haplotypes comprising markers shown in Table 13.

[0094] Increased risk for MI, ACS, stroke or PAOD in individuals with a FLAP at-risk haplotype is logically conferred by increased production of leukotrienes in the arterial vessel wall or in bone-marrow derived inflammatory cells within the blood and/or arterial vessel wall. It is shown herein that FLAP at-risk haplotypes are associated with higher production of LTB4 ex vivo. It is further shown herein that serum leukotriene levels (specifically, leukotriene E4) correlate with serum CRP levels in myocardial infarction patients. FLAP genetic variation may drive high leukotriene levels (within the blood vessel and/or systemically), which in turn may drive higher CRP levels which has been shown as a risk factor for MI. Accordingly, individuals with a FLAP at-risk haplotype are likely to have elevated serum CRP as well as other serum inflammatory markers. The level of serum CRP or other serum inflammatory markers can be used as a surrogate for the level of arterial wall inflammation initiated by lipid deposition and atherogenesis conferred by the presence of the at-risk FLAP haplotype.

[0095] In another embodiment of the invention, an individual who is at risk for MI, ACS, stroke or PAOD is an individual who has a polymorphism in a FLAP gene, in which the presence of the polymorphism is indicative of a susceptibility to MI, ACS, stroke or PAOD. The term “gene,” as used herein, refers to not only the sequence of nucleic acids encoding a polypeptide, but also the promoter regions, transcription enhancement elements, splice donor/acceptor sites, and other non-transcribed nucleic acid elements. Representative polymorphisms include those presented in Table 13, below.

[0096] In a further embodiment of the invention, an individual who is at risk for MI, ACS, stroke or PAOD is an individual who has an at-risk polymorphism in the 5-LO gene in the promoter region, as described herein.

[0097] In one embodiment of the invention, an individual who is at risk for MI or ACS is an individual who has an at-risk haplotype in LTA4H, as described herein. In one embodiment, the haplotype can comprise alleles 0, T, 0, and A, of markers DG12S1664, SG12S26, DG12S1666, and SG12S144, respectively, at the 12q23 locus. This LTA4H “at-risk” haplotype is detected in over 76% of male patients who have previously had an MI, conferring an increased relative risk of 1.4 fold and in 72% of female MI patients with a relative risk of 1.2. Increased risk for MI or ACS in individuals with an LTA4H at-risk haplotype is logically conferred by increased production of leukotrienes in the arterial vessel wall or in bone-marrow derived inflammatory cells within the blood and/or arterial vessel wall. In another embodiment of the invention, an individual who is at risk for MI or ACS is an individual who has a polymorphism in an LTA4H gene, in which the presence of the polymorphism is indicative of a susceptibility to MI or ACS. The term “gene,” as used herein, refers to not only the sequence of nucleic acids encoding a polypeptide, but also the promoter regions, transcription enhancement elements, splice donor/acceptor sites, and other non-transcribed nucleic acid elements. Representative polymorphisms include those presented in Table 37. Along the same lines, certain variants in the FLAP gene and other members of the leukotriene biosynthetic and response pathway (see, U.S. Provisional Application No. 60/419,432, filed on Oct. 17, 2002; U.S. patent application Ser. No. 10/829,674, filed on Apr. 22, 2004) may indicate one's increased risk for MI and ACS. Other representatibe at-risk haplotypes are shown in Table 38 and Table 39. Additional “at-risk” haplotypes can be determined using linkage disequilibrium and/or haplotype blocks.

[0098] In an embodiment, an individual who is at risk for MI, ACS, stroke or PAOD is an individual who has an elevated inflammatory marker. An “elevated inflammatory marker,” as used herein, is the presence of an amount of an inflammatory marker that is greater, by an amount that is statistically significant, than the amount that is typically found in control individual(s) or by comparison of disease risk in a population associated with the lowest band of measurement (e.g., below the mean or median, the lowest quartile or the lowest quintile) compared to higher bands of measurement (e.g., above the mean or median, the second, third or fourth quartile; the second, third, fourth or fifth quintile). An “inflammatory marker” refers to a molecule that is indicative of the presence of inflammation in an individual, for example, C-reactive protein (CRP), serum amyloid A, fibrinogen, leukotriene levels (e.g., leukotriene B4, leukotriene C4), leukotriene metabolites (e.g., leukotriene E4), interleukin-6, tissue necrosis factor-alpha, soluble vasculare cell adhesion molecules (sVCAM), soluble intervascular adhesion molecules (sICAM), E-selectin, matrix metalloprotease type-1, matrix metalloprotease type-2, matrix metalloprotease type-3, matrix metalloprotease type-9, myeloperoxidase (MPO), N-tyrosine) or other markers (see, e.g., Doggen, C. J. M. et al., J. Internal Med., 248:406-414 (2000); Ridker, P. M. et al., New Englnd. J. Med. 1997: 336: 973-979, Rettersol, L. et al., 2002: 160:433-440; Ridker, P. M. et. al., New England. J. Med., 2002: 347: 1557-1565; Bermudez, E. A. et. al., Arterioscler. Thromb. Vasc. Biol., 2002: 22:1668-1673). In certain embodiments, the presence of such inflammatory markers can be measured in serum or urine.

[0099] In an embodiment, an individual who is at risk for MI, ACS, stroke or PAOD is an individual who has increased LDL cholesterol and/or decreased HDL cholesterol levels. For example, the American Heart Association indicates that an LDL cholesterol level of less than 100 mg/dL is optimal; from 100-129 mg/dL is near/above optimal; from 130-159 mg/dL is borderline high; from 160-189 is high; and from 190 and up is very high. Therefore, an individual who is at risk for MI, ACS, stroke or PAOD because of an increased LDL cholesterol level is, for example, an individual who has more than 100 mg/dL cholesterol, such as an individual who has a near/above optimal level, a borderline high level, a high level or a very high level. Similarly, the American Heart Association indicates that an HDL cholesterol level of less than 40 mg/dL is a major risk factor for heart disease; and an HDL cholesterol level of 60 mg/dL or more is protective against heart disease. Thus, an individual who is at risk for MI, ACS, stroke or PAOD because of a decreased HDL cholesterol level is, for example, an individual who has less than 60 mg/dL HDL cholesterol, such as an individual who has less than 40 mg/dL HDL cholesterol.

[0100] In another embodiment, an individual who is at risk for MI, ACS, stroke or PAOD is an individual who has increased leukotriene synthesis. “Increased leukotriene synthesis,” as used herein, indicates an amount of production of leukotrienes that is greater, by an amount that is statistically significant, than the amount of production of leukotrienes that is typically found in control individual(s) or by comparison of leukotriene production in a population associated with the lowest band of measurement (e.g., below the mean or median, the lowest quartile or the lowest quintile) compared to higher bands of measurement (e.g., above the mean or median, the second, third or fourth quartile; the second, third, fourth or fifth quintile). For example, the FLAP at-risk haplotypes correlate with increased serum leukotriene synthesis levels, and with increased production of leukotrienes ex vivo. An individual can be assessed for the presence of increased leukotriene synthesis by a variety of methods. For example, an individual can be assessed for an increased risk of MI, ACS, stroke, PAOD or atherosclerosis, by assessing the level of a leukotriene metabolite (e.g., LTE4) in a sample (e.g., serum, plasma or urine) from the individual. Samples containing blood, cells, or tissue can also be obtained from an individual and used to assess leukotriene or leukotriene metabolite production ex vivo under appropriate assay conditions. An increased level of leukotriene metabolites, and/or an increased level of leukotriene production ex vivo, is indicative of increased production of leukotrienes in the individual, and of an increased risk of MI, ACS, stroke, PAOD or atherosclerosis.

[0101] In a further embodiment, an individual who is at risk for MI, ACS, or stroke is an individual who has already experienced at least one MI, ACS event or stroke, or who has stable angina, and is therefore at risk for a second MI, ACS event or stroke. In another embodiment, an individual who is at risk for MI, ACS, stroke or PAOD is an individual who has atherosclerosis or who requires treatment (e.g., angioplasty, stents, revascularization procedure) to restore blood flow in arteries.

[0102] In further embodiments, an individual who is at risk for MI, stroke or PAOD is an individual having asymptomatic ankle/brachial index of less than 0.9; an individual who is at risk for stroke, is an individual who has had one or more transient ischemic attacks; who has had transient monocular blindness; has had a carotid endarterectomy; or has asymptomatic carotid stenosis; an individual who is at risk for PAOD, is an individual who has (or had) claudication, limb ischemia leading to gangrene, ulceration or amputation, or has had a revascularization procedure.

[0103] In additional embodiments, an individual who is at risk for MI, ACS, stroke or PAOD is an individual who has diabetes; hypertension; hypercholesterolemia; elevated triglycerides (e.g., >200 mg/dl); elevated lp(a); obesity; ankle/brachial index (ABI) less than 0.9; and/or is a past or current smoker.

[0104] Individuals at risk for MI, ACS, stroke or PAOD may fall into more than one of these representative target populations. For example, an individual may have experienced at least one MI, ACS event, transient ischemic attack, transient monocular blindness, or stroke, and may also have an increased level of an inflammatory marker. As used therein, the term “individual in a target population” refers to an individual who is at risk for MI, ACS, stroke or PAOD who falls into at least one of the representative target populations described above.

### Assessment For At-Risk Haplotypes

[0105] A “haplotype,” as described herein, refers to a combination of genetic markers (“alleles”), such as those set forth in Table 13. In a certain embodiment, the haplotype can comprise one or more alleles (e.g., a haplotype containing a single SNP), two or more alleles, three or more alleles, four or more alleles, or five or more alleles. The genetic markers are particular “alleles” at “polymorphic sites” associated with FLAP. A nucleotide position at which more than one sequence is possible in a population (either a natural population or a synthetic population, e.g., a library of synthetic molecules), is referred to herein as a “polymorphic site”. Where a polymorphic site is a single nucleotide in length, the site is referred to as a single nucleotide polymorphism (“SNP”). For example, if at a particular chromosomal location, one member of a population has an adenine and another member of the population has a thymine at the same position, then this position is a polymorphic site, and, more specifically, the polymorphic site is a SNP. Polymorphic sites can allow for differences in sequences based on substitutions, insertions or deletions. Each version of the sequence with respect to the polymorphic site is referred to herein as an “allele” of the polymorphic site. Thus, in the previous example, the SNP allows for both an adenine allele and a thymine allele.

[0106] Typically, a reference sequence is referred to for a particular sequence. Alleles that differ from the reference are referred to as “variant” alleles. For example, the reference FLAP sequence is described herein by SEQ ID NO: 1. The term, “variant FLAP”, as used herein, refers to a sequence that differs from SEQ ID NO: 1, but is otherwise substantially similar. The genetic markers that make up the haplotypes described herein are FLAP variants.

[0107] Additional variants can include changes that affect a polypeptide, e.g., the FLAP polypeptide. These sequence differences, when compared to a reference nucleotide sequence, can include the insertion or deletion of a single nucleotide, or of more than one nucleotide, resulting in a frame shift; the change of at least one nucleotide, resulting in a change in the encoded amino acid; the change of at least one nucleotide, resulting in the generation of a premature stop codon; the deletion of several nucleotides, resulting in a deletion of one or more amino acids encoded by the nucleotides; the insertion of one or several nucleotides, such as by unequal recombination or gene conversion, resulting in an interruption of the coding sequence of a reading frame; duplication of all or a part of a sequence; transposition; or a rearrangement of a nucleotide sequence, as described in detail above. Such sequence changes alter the polypeptide encoded by a FLAP nucleic acid. For example, if the change in the nucleic acid sequence causes a frame shift, the frame shift can result in a change in the encoded amino acids, and/or can result in the generation of a premature stop codon, causing generation of a truncated polypeptide. Alternatively, a polymorphism associated with a susceptibility to MI, ACS, stroke or PAOD can be a synonymous change in one or more nucleotides (i.e., a change that does not result in a change in the amino acid sequence). Such a polymorphism can, for example, alter splice sites, affect the stability or transport of mRNA, or otherwise affect the transcription or translation of the polypeptide. The polypeptide encoded by the reference nucleotide sequence is the “reference” polypeptide with a particular reference amino acid sequence, and polypeptides encoded by variant alleles are referred to as “variant” polypeptides with variant amino acid sequences.

[0108] Haplotypes are a combination of genetic markers, e.g., particular alleles at polymorphic sites. The haplotypes described herein, e.g., having markers such as those shown in Table 13, are found more frequently in individuals with MI, ACS, stroke or PAOD than in individuals without MI, ACS, stroke or PAOD. Therefore, these haplotypes have predictive value for detecting a susceptibility to MI, ACS, stroke or PAOD in an individual. The haplotypes described herein are in some cases a combination of various genetic markers, e.g., SNPs and microsatellites. Therefore, detecting haplotypes can be accomplished by methods known in the art for detecting sequences at polymorphic sites, such as the methods described above.

[0109] In certain methods described herein, an individual who is at risk for MI, ACS, stroke or PAOD is an individual in whom an at-risk haplotype is identified. In one embodiment, the at-risk haplotype is one that confers a significant risk of MI, ACS, stroke or PAOD. In one embodiment, significance associated with a haplotype is measured by an odds ratio. In a further embodiment, the significance is measured by a percentage. In one embodiment, a significant risk is measured as an odds ratio of at least about 1.2, including by not limited to: 1.2, 1.3, 1.4, 1.5, 1.6, 1.7, 1.8, and 1.9. In a further embodiment, an odds ratio of at least 1.2 is significant. In a further embodiment, an odds ratio of at least about 1.5 is significant. In a further embodiment, a significant increase in risk is at least about 1.7 is significant. In a further embodiment, a significant increase in risk is at least about 20%, including but not limited to about 25%, 30%, 35%, 40%, 45%, 50%, 55%, 60%, 65%, 70%, 75%, 80%, 85%, 90%, 95%, and 98%. In a further embodiment, a significant increase in risk is at least about 50%. In yet another embodiment, an at-risk haplotype has a p value <0.05. It is understood however, that identifying whether a risk is medically significant may also depend on a variety of factors, including the specific disease, the haplotype, and often, environmental factors.

[0110] An at-risk haplotype in, or comprising portions of, the FLAP gene, in one where the haplotype is more frequently present in an individual at risk for MI, ACS, stroke or PAOD (affected), compared to the frequency of its presence in a healthy individual (control), and wherein the presence of the haplotype is indicative of susceptibility to MI, ACS, stroke or PAOD. As an example of a simple test for correlation would be a Fisher-exact test on a two by two table. Given a cohort of chromosomes the two by two table is constructed out of the number of chromosomes that include both of the haplotypes, one of the haplotype but not the other and neither of the haplotypes.

[0111] In certain embodiments, an at-risk haplotype is an at-risk haplotype within or near FLAP that significantly correlates with a haplotype such as a halotype shown in Table 14; a haplotype shown in Table 15; a haplotype shown in Table 19; haplotype B4; haplotype B5; haplotype B6; haplotype A4; haplotype A5; or haplotype HapB. In other embodiments, an at-risk haplotype comprises an at-risk haplotype within or near FLAP that significantly correlates with susceptibility to myocardial infarction or stroke. In a particular embodiment, a haplotype associated with a susceptibility to myocardial infarction, ACS, stroke or PAOD comprises markers SG13S99, SG13S25, SG13S377, SG13S106, SG13S32 and SG13S35 at the 13q12-13 locus. In another embodiment, a haplotype associated with a susceptibility to myocardial infarction, ACS, stroke or PAOD comprises markers SG13S99, SG13S25, SG13S106, SG13S30 and SG13S42 at the 13q12-13 locus. In a third embodiment, a haplotype associated with a susceptibility to myocardial infarction, ACS, stroke or PAOD comprises markers SG13S25, SG13S106, SG13S30 and SG13S42 at the 13q12-13 locus. In a fourth embodiment, a haplotype associated with a susceptibility to myocardial infarction, ACS, stroke or PAOD comprises markers SG13S99, SG13S25, SG13S114, SG13S89 and SG13S32 at the 13q12-13 locus. In another embodiment, a haplotype associated with a susceptibility to myocardial infarction, ACS, stroke or PAOD comprises marker SG13S375 at the 13q12-13 locus. In another embodiment, a haplotype associated with a susceptibility to myocardial infarction, ACS, stroke or PAOD comprises markers SG13S25 and SG13S375 at the 13q12-13 locus. In another embodiment, a haplotype associated with a susceptibility to myocardial infarction, ACS, stroke or PAOD comprises markers SG13S25, SG13S375 and SG13S32 at the 13q12-13 locus. In an additional embodiment, a -haplotype associated with a susceptibility to myocardial infarction, ACS, stroke or PAOD comprises markers SG13S25, SG13S375, SG13S32 and SG13S106. In other embodiments, the at-risk haplotype is selected from the group consisting of: haplotype B4, B5, B6, A4, A5, C1, C2, C3, C4-A and C4-B. The at-risk haplotype can also comprise a combination of the markers in the haplotypes B4, B5, B6, A4, A5, C1, C2, C3, C4-A and/or C4-B. In further embodiments, the at-risk haplotype can be haplotype HapB. In other embodiments, the at-risk haplotype comprises a polymorphism shown in Table 13.

[0112] Standard techniques for genotyping for the presence of SNPs and/or microsatellite markers can be used, such as fluorescent based techniques (Chen, et al., Genome Res. 9, 492 (1999)), PCR, LCR, Nested PCR and other techniques for nucleic acid amplification. In a preferred embodiment, the method comprises assessing in an individual the presence or frequency of SNPs and/or microsatellites in, comprising portions of, the FLAP gene, wherein an excess or higher frequency of the SNPs and/or microsatellites compared to a healthy control individual is indicative that the individual is susceptible to MI, ACS, stroke or PAOD. See, for example, Table 13 (below) for SNPs and markers that can form haplotypes that can be used as screening tools. These markers and SNPs can be identified in at-risk haploptypes. For example, an at-risk haplotype can include microsatellite markers and/or SNPs such as those set forth in Table 13. The presence of the haplotype is indicative of a susceptibility to MI, ACS, stroke or PAOD, and therefore is indicative of an individual who falls within a target population for the treatment methods described herein.

[0113] Haplotype analysis involves defining a candidate susceptibility locus using LOD scores. The defined regions are then ultra-fine mapped with microsatellite markers with an average spacing between markers of less than 100 kb. All usable microsatellite markers that are found in public databases and mapped within that region can be used. In addition, microsatellite markers identified within the deCODE genetics sequence assembly of the human genome can be used. The frequencies of haplotypes in the patient and the control groups can be estimated using an expectation-maximization algorithm (Dempster A. et al., 1977. J. R. Stat. Soc. B, 39:1-389). An implementation of this algorithm that can handle missing genotypes and uncertainty with the phase can be used. Under the null hypothesis, the patients and the controls are assumed to have identical frequencies. Using a likelihood approach, an alternative hypothesis is tested, where a candidate at-risk-haplotype, which can include the markers described herein, is allowed to have a higher frequency in patients than controls, while the ratios of the frequencies of other haplotypes are assumed to be the same in both groups. Likelihoods are maximized separately under both hypotheses and a corresponding l-df likelihood ratio statistic is used to evaluate the statistic significance.

[0114] To look for at-risk-haplotypes in the 1-lod drop, for example, association of all possible combinations of genotyped markers is studied, provided those markers span a practical region. The combined patient and control groups can be randomly divided into two sets, equal in size to the original group of patients and controls. The haplotype analysis is then repeated and the most significant p-value registered is determined. This randomization scheme can be repeated, for example, over 100 times to construct an empirical distribution of p-values. In a preferred embodiment, a p-value of <0.05 is indicative of an at-risk haplotype.

[0115] A detailed discussion of haplotype analysis is described in International Application No. PCT/US03/32556, filed on Oct. 16, 2003, which is incorporated by reference herein in its entirety.

### Methods of Treatment

[0116] The present invention encompasses methods of treatment (prophylactic and/or therapeutic, as described above) for MI, ACS, stroke or PAOD in individuals, such as individuals in the target populations described above, as well as for other diseases and conditions associated with FLAP or with other members of the leukotriene pathway (e.g., for atherosclerosis). Members of the “leukotriene pathway,” as used herein, include polypeptides (e.g., enzymes, receptors) and other molecules that are associated with production of leukotrienes: for example, proteins or enzymes such as FLAP, 5-LO, other leukotriene biosynthetic enzymes (e.g., leukotriene C4 synthase, leukotriene A4.hydrolase); receptors or binding agents of the enzymes; leukotrienes such as LTA4, LTB4, LTC4, LTD4, LTE4; and receptors of leukotrienes (e.g., leukotriene B4 receptor 1 (BLT1), leukotriene B4 receptor 2 (BLT2), cysteinyl leukotriene receptor 1 (CysLTR1), cysteinyl leukotriene receptor 2 (CysLTR2)).

[0117] In particular, the invention relates to methods of treatment for myocardial infarction or susceptibility to myocardial infarction (for example, for individuals in an at-risk population such as those described above); as well as methods of treatment for acute coronary syndrome (e.g., unstable angina, non-ST-elevation myocardial infarction (NSTEMI) or ST-elevation myocardial infarction (STEMI)); methods for reducing risk of MI, stroke or PAOD in persons with asymptomatic ankle/brachial index less than 0.9; for decreasing risk of a second myocardial infarction; for stroke or susceptibility to stroke; for transient ischemic attack; for transient monocular blindness; for decreasing risk of a second stroke; for PAOD or susceptibility to PAOD; for ABI less than 0.9; for claudication or limb ischemia; for atherosclerosis, such as for patients requiring treatment (e.g., angioplasty, stents, revascularization procedure) to restore blood flow in arteries (e.g., coronary, carotid, and/or femoral arteries); for treatment of asymptomatic ankle/brachial index of less than 0.9; and/or for decreasing leukotriene synthesis (e.g., for treatment of MI, ACS, stroke or PAOD). The invention additionally pertains to use of one or more leukotriene synthesis inhibitors, as described herein, for the manufacture of a medicament for the treatment of MI, ACS, stroke, PAOD and/or atherosclerosis, e.g., using the methods described herein. The invention also provides for the use of one or more leukotriene synthesis inhibitors, as described herein, for the manufacture of a medicament for reducing the risk for MI, ACS, PAOD, stroke and/or. artherosclerosis using the methods described herein. These medicaments may comprise a leukotriene synthesis inhibitor alone or in combination with a statin, as described herein.

[0118] In the methods of the invention, a “leukotriene synthesis inhibitor” is used. In one embodiment, a “leukotriene synthesis inhibitor” is an agent that inhibits FLAP polypeptide activity and/or FLAP nucleic acid expression, as described herein (e.g., a nucleic acid antagonist). In another embodiment, a leukotriene synthesis inhibitor is an agent that inhibits polypeptide activity and/or nucleic acid expression of another member of the leukotriene biosynthetic pathway (e.g., 5-LO; LTC4S; LTA4H; LTB4DH). In still another embodiment, a leukotriene synthesis inhibitor is an agent that alters activity or metabolism of a leukotriene (e.g., an antagonist of a leukotriene; an antagonist of a leukotriene receptor). In preferred embodiments, the leukotriene synthesis inhibitor alters activity and/or nucleic acid expression of FLAP or of 5-LO, or alters interaction between FLAP and 5-LO.

[0119] Leukotriene synthesis inhibitors can alter polypeptide activity or nucleic acid expression of a member of the leukotriene pathway by a variety of means, such as, for example, by catalytically degrading, downregulating or interfering with the expression, transcription or translation of a nucleic acid encoding the member of the leukotriene pathway; by altering posttranslational processing of the polypeptide; by altering transcription of splicing variants; or by interfering with polypeptide activity (e.g., by binding to the polypeptide, or by binding to another polypeptide that interacts with that member of the leukotriene pathway, such as a FLAP binding agent as described herein or some other binding agent of a member of the leukotriene pathway; by altering interaction among two or more members of the leukotriene pathway (e.g., interaction between FLAP and 5-LO); or by antagonizing activity of a member of the leukotriene pathway.

[0120] Representative leukotriene synthesis inhibitors include the following: agents that inhibit activity of a member of the leukotriene biosynthetic pathway (e.g., FLAP, 5-LO), LTC4S, LTA4H, such as the agents presented in the Agent Tables I and II herein; agents that inhibit activity of receptors of members of the leukotriene pathway, such as FLAP receptors, LTA4 receptors, LTB4 receptors (e.g. BLT1, BLT2), LTC4 receptors, LTD4 receptors, LTE4 receptors, Cys LT1 receptors, Cys LT2 receptors, 5-LO receptors; BLT1; BLT2; CysLTR1; CysLTR2; agents that bind to the members of the leukotriene pathway, such as FLAP binding agents (e.g., 5-LO) or agents that bind to receptors of members of the leukotriene pathway (e.g., leukotriene receptor antagonists); agents that bind to a leukotriene (e.g., to LTA4, LTB4, LTC4, LTD4, LTE4, Cys LT1, Cys LT2); agents that increase breakdown of leukotrienes (e.g., LTB4DH); or other agents that otherwise affect (e.g., increase or decrease) activity of the leukotriene;

[0121] antibodies to leukotrienes;

[0122] antisense nucleic acids or small double-stranded interfering RNA, to nucleic acids encoding FLAP, 5-LO, LTA4H, or a leukotriene synthetase or other member of the leukotriene pathway, or fragments or derivatives thereof, including antisense nucleic acids to nucleic acids encoding the FLAP, 5-LO or leukotriene synthetase polypeptides, and vectors comprising such antisense nucleic acids (e.g., nucleic acid, cDNA, and/or mRNA, double-stranded interfering RNA, or a nucleic acid encoding an active fragment or derivative thereof, or an oligonucleotide; for example, the complement of one of SEQ ID Nos. 1, 3, 718 or 719, or a nucleic acid complementary to the nucleic acid encoding SEQ ID NO: 2 or 718, or fragments or derivatives thereof);

[0123] peptidomimetics; fusion proteins or prodrugs thereof; ribozymes; other small molecules; and

[0124] other agents that alter (e.g., inhibit or antagonize) expression of a member of the leukotriene pathway, such as FLAP, 5-LO or LTA4H nucleic acid expression or polypeptide activity, or that regulate transcription of FLAP splicing variants, 5-LO splicing variants or LTA4H splicing variants(e.g., agents that affect which splicing variants are expressed, or that affect the amount of each splicing variant that is expressed).

[0125] More than one leukotriene synthesis inhibitor can be used concurrently, if desired.

[0126] The therapy is designed to alter activity of a FLAP polypeptide, a 5-LO polypeptide, or another member of the leukotriene pathway in an individual, such as by inhibiting or antagonizing activity. For example, a leukotriene synthesis inhibitor can be administered in order to decrease synthesis of leukotrienes within the individual, or to downregulate or decrease the expression or availability of the FLAP nucleic acid or specific splicing variants of the FLAP nucleic acid. Downregulation or decreasing expression or availability of a native FLAP nucleic acid or of a particular splicing variant could minimize the expression or activity of a defective nucleic acid or the particular splicing variant and thereby minimize the impact of the defective nucleic acid or the particular splicing variant. Similarly, for example, a leukotriene synthesis inhibitor can be administered in order to downregulate or decrease the expression or availability of the nucleic acid encoding 5-LO or specific splicing variants of the nucleic acid encoding 5-LO.

[0127] The leukotriene synthesis inhibitor(s) are administered in a therapeutically effective amount (i.e., an amount that is sufficient to treat the disease or condition, such as by ameliorating symptoms associated with the disease or condition, preventing or delaying the onset of the disease or condition, and/or also lessening the severity or frequency of symptoms of the disease or condition). The amount which will be therapeutically effective in the treatment of a particular individual's disease or condition will depend on the symptoms and severity of the disease, and can be determined by standard clinical techniques. In addition, in vitro or in vivo assays may optionally be employed to help identify optimal dosage ranges. The precise dose to be employed in the formulation will also depend on the route of administration, and the seriousness of the disease or disorder, and should be decided according to the judgment of a practitioner and each patient's circumstances. Effective doses may be extrapolated from dose-response curves derived from in vitro or animal model test systems.

[0128] In preferred embodiments of the invention, the leukotriene synthesis inhibitor agent is an agent that inhibits activity of FLAP and/or of 5-LO. Preferred agents include the following, as set forth in Agent Table I below:

| | | | | | Date Patent | |
|---|---|---|---|---|---|---|
| | Product_Name | | | | Issued/Applica- | |
| Company | (Code) | Structure | Chemical Name | Patent Ref | tion Published | MOA |
| Abbott | atreleuton (ABT-761) | [chemical structure] | (R)-(+)-N-[3[5-[(4-fluoro- phenyl)methyl]-2thienyl]-1meth- yl-2-propynyl]-N-hy- droxurea | U.S Pat. No. 5288751, U.S. Pat. No. 5288743, U.S. Pat. No. 5616596 | 2/22/94 04/01/97 | 5-LPO Inhibitor |
| Abbott | A-81834 | [chemical structure] | 3-(3-(1,1-dimethylethylthio-5-(quino- line-2-ylmethoxy)-1-(4-chloro- methylphenyl)indole-2-yl)-2,2-di- methylpropionaldehyde oxime-0-2-acetic acid | WO9203132, U.S. Pat. No. 5459150 | 3/5/1992, 10/17/95 | FLAP inhibitor |
| Abbott | A-86886 | [chemical structure] | 3-(3-(1,1-dimethylethylthio-5-(py- ridin-2-ylmethoxy)-1-(4-chloro- methylphenyl)indole-2-yl)-2,2-di- methylpropionaldehyde oxime-0-2-acetic acid | WO9203132, U.S. Pat. No. 5459150 | 3/5/1992, 10/17/95 | 5-LPO inhibitor |
| Abbott | A-93178 | [chemical structure] | | | | FLAP inhibitor |
| Astra- Zeneca | AZD-4407 | [chemical structure] | | EP 623614 | 09/11/94 | 5-LPO inhibitor |
| Astra- Zeneca | ZD-2138 | [chemical structure] | 6-((3-fluoro-5-(tetra- hydro-4-methoxy-2H-py- ran-4yl)phenoxy)methyl)1-meth- yl-2(1H)-quino- linone (alternatively NH can be N-methyl) | EP 466452 | | 5-LPO inhibitor |
| Bayer | BAY-X-1005 | [chemical structure] | (R)-(+)-alpha-cyclopentyl 4-(2-quinolinylmethoxy)-Benzene- acetic acid | U.S. Pat. No. 4970215 EP 344519, DE 19880531 | | FLAP inhibitor |
| Merck | MK-0591 | [chemical structure] | 1-((4-chloro- phenyl)methyl)-3-((1,1-di- methylethyl)thio)alpha, alph-dimethyl-5-(2-quino- linylmethoxy)-1H-In- dole-2-proanoic acid | EP 419049, U.S. Pat. No. 19890822 | | FLAP inhibitor |
| Merck | MK-866 | | (3[3-)4-chlorobenzyl)-3-t-butyl-thi- o-5-isopropylindol-2-yl]2,2-di- methyl-propanoic acid | | | 5-LPO inhibitor |
| Merck | MK-886 | [chemical structure] | 1-((4-chloro- phenyl)methyl)-3-((1,1di- methylethyl)thio)-alpha, alpha-dimethyl-5-(2-quino- linylmethoxy)-1H-In- dole-2-propanoic acid | EP 419049, U.S. Pat. No. 19890822 | | 5-LPO inhibitor |
| Pfizer | CJ-13610 | | 4-(3-(4-(2-Methyl-imi- dazol-1-yl)-phenyl- sulfanyl)-phenyl)-tetra- hydro-pyran-4-carboxylic acid amide | | | 5-LPO inhibitor |

[0129] In preferred methods of the invention, the agents set forth in the Agent Table III can be used for prophylactic and/or therapeutic treatment for diseases and conditions associated with FLAP or with other members of the leukotriene pathway, or with increased leukotriene synthesis. In particular, they can be used for treatment for myocardial infarction or susceptibility to myocardial infarction, such as for individuals in an at-risk population as described above, (e.g., based on identified risk factors such as elevated cholesterol, elevated C-reactive protein, and/or genotype); for individuals suffering from acute coronary syndrome, such as unstable angina, non-ST-elevation myocardial infarction (NSTEMI) or ST-elevation myocardial infarction (STEMI); methods for reducing risk of MI, stroke or PAOD in persons with asymptomatic ankle/brachial index less than 0.9; for decreasing risk of a subsequent myocardial infarction, such as in individuals who have already had one or more myocardial infarctions; for stroke or susceptibility to stroke; for decreasing risk of a second stroke; for PAOD or susceptibility to PAOD; for treatment of atherosclerosis, such as in patients requiring treatment (e.g., angioplasty, stents, revascularization procedure) to restore blood flow in arteries (e.g., coronary, carotid, and/or femoral arteries); for treatment of asymptomatic ankle/brachial index of less than 0.9; and/or for decreasing leukotriene synthesis (e.g., for treatment of myocardial infarction, ACS, stroke or PAOD

[0130] In one preferred embodiment of the invention, the leukotriene synthesis inhibitor is an inhibitor of FLAP such as 1-((4-chlorophenyl)methyl)-3-((1,1-dimethylethyl)thio)-alpha,alpha-dimethyl-5-(2-quinolinylmethoxy)-1H-Indole-2-propanoic acid otherwise known as MK-0591, (R)-(+)-alpha-cyclopentyl-4-(2-quinolinylmethoxy)-Benzeneacetic acid otherwise known as BAY-x-1005, 3-(3-(1,1-dimethylethylthio-5-(quinoline-2-ylmethoxy)-1-(4-chloromethylphenyl)indole-2-yl)-2,2-dimethylpropionaldehyde oxime-0-2-acetic acid otherwise known as A-81834, their optically pure enantiomers, salts, chemical derivatives, analogues, or other compounds inhibiting FLAP that effectively decrease leukotriene biosynthesis when administered to humans.

[0131] In another preferred embodiment of the invention, the leukotriene synthesis inhibitor is an inhibitor of 5LO such as zileuton, atreleuton, 6-((3-fluoro-5-(tetrahydro-4-methoxy-2H-pyran-4yl)phenoxy)methyl)-1-methyl-2(1H)-quinlolinone otherwise known as ZD-2138, 1-((4-chlorophenyl)methyl)-3-((1,1dimethylethyl)thio)-alpha,alpha-dimethyl-5-(2-quinolinylmethoxy)-1H-Indole-2-propanoic acid otherwise known as MK-886, 4-(3-(4-(2-Methyl-imidazol-1-yl)-phenylsulfanyl)-phenyl)-tetrahydro-pyran-4-carboxylic acid amide otherwise known as CJ-13610, their optically pure enantiomers, salts, chemical derivatives, analogues or other compounds inhibiting 5-LO that effectively decrease leukotriene biosynthesis when administered to humans.

[0132] The compound can be represented by the following formula:

[chemical structure]

[0133] in M is selected from the group consisting of hydrogen, a pharmaceutically acceptable cation, and a pharmaceutically acceptable metabolically cleavable group; B is a straight or branched divalent alkylene group of from one to twelve carbon atoms; Z is thiazolyl, optionally substituted with alkyl of from one to six carbon atoms or haloalkyl of from one to six carbon atoms; L is selected from the group consisting of (a) alkylene of from 1-6 carbon atoms, (b) alkenylene of from 2-6 carbon atoms, (c) alkynylene of from 2-6 carbon atoms, (d) hydroxyalkyl of 1-6 carbon atoms, (e) >C═O, (f) >C═N—OR₁, where R₁ is hydrogen or C₁-C₆ alkyl, (g) —(CHR1)ₙ (CO)(CHR₂)ₘ, where n and m are independently selected from an integer from one to six and R₁ and R₂ are independently selected from hydrogen and C₁-C₆-alkyl, (h) —(CHR1)ₙ C═NOR₂, where R₁, R₂ and n are as defined above; (i) —(CHR₁)ₙ ON═CR₂, where R₁, R₂ and n are as: defined above; (j) —(CHR₁)ₙ —O—(CHR₂)ₘ—, where R₁, R₂, n and m are as defined above, (k) —(CHR₁)ₙ —NR₂ (CHR₃)ₘ—, where R₁, R₂, n and m are as defined above and R₃ is selected from hydrogen and C₁-C₆-alkyl; (l) —(CHR₁)ₙ —S—CHR₂)ₘ—, where R₁, R₂, n and m are as defined above; and (m) —(CHR₁)N —(SO₂)—(CHR₂)ₘ—, where R₁, R₂, n and m are as defined above; A is carbocyclic aryl optionally substituted with alkyl of from one to six carbon atoms, haloalkyl of from one to six carbon atoms, hydroxyalkyl of from one to six carbon atoms, alkoxy of from one to twelve carbon atoms, alkoxyalkoxyl in which the two alkoxy portions may each independently contain from one to six carbon atoms, alkylthio of from one to six carbon atoms, hydroxy, halogen, cyano, amino, alkylamino of from one to six carbon atoms, dialkylamino in which the two alkyl groups may independently contain from one to six carbon atoms, alkanoylamino of from two to eight carbon atoms, N-alkanoyl-N-alkylamino in which the alkanoyl is of from two to eight carbon atoms and the alkyl group is of from one to six carbon atoms, alkylaminocarbonyl of from two to eight carbon atoms, dialkylaminocarbonyl in which the two alkyl groups are independently of from one to six carbon atoms, carboxyl, alkoxycarbonyl or from two to eight carbon atoms, phenyl, optionally substituted with alkyl of from one to six carbon atoms, haloalkyl of from one to six carbon atoms, alkoxy of from one to six carbon atoms, hydroxy or halogen, phenoxy, optionally substituted with alkyl of from one to six carbon atoms, haloalkyl of from one to six carbon atoms, alkoxy of from one to six carbon atoms, hydroxy or halogen, and phenylthio, optionally substituted with alkyl of from one to six carbon atoms, haloalkyl of from one to six carbon atoms, alkoxy of from one to six carbon atoms, hydroxy or halogen. Preferably, the compound is a compound or pharmaceutically acceptable salt thereof having the name (R)-N-{3-[-5-(4-fluorophenylmethyl)thiazo-2-yl]-1methyl-2-propynyl}-N-hydroxyurea. See U.S. Pat. No. 4,615,596, incorporated herein by reference.

[0134] The compound is represented by the following formula:

[chemical structure]

[0135] or a pharmaceutically acceptable salt thereof, wherein A is selected from the group consisting of straight or branched divalent alkylene of from one to twelve carbon atoms and divalent cycloalkylene of from three to eight carbon atoms; R₁ is selected from the group consisting of hydrogen, alkylthio of from one to six carbon atoms, phenylthio, optionally substituted with alkyl of from one to six carbon atoms, alkoxy of from one to six carbon atoms, or halogen, phenylalkylthio in which the alkyl portion contains from one to six carbon atoms, and the phenyl group is optionally substituted with alkyl of from one to six carbon atoms, alkoxy of from one to six carbon atoms, or halogen, R₂ is selected from the group consisting of —COOB wherein B is selected from hydrogen, a pharmaceutically acceptable cation, or a metabolically cleavable group, —COOalkyl where the alkyl portion contains from one to six carbon atoms, —COOalkylcarbocyclicaryl where the alkyl portion contains from one to six carbon atoms and the aryl portion is optionally substituted with alkyl of from one to six carbon atoms, alkoxy of from one to six carbon atoms, or halogen, —CONR₅ R₆ wherein R₅ is selected from the group consisting of hydrogen, hydroxyl, alkyl of from one to six carbon atoms, and alkoxy of from one to six carbon atoms, and R₆ is selected from the group consisting of hydrogen and alkyl of from one to six carbon atoms, —COR₆, and —OH; R₃ is selected from the group consisting of phenylalkyl in which the alkyl portion contains from one to six carbon atoms, and the phenyl group is optionally substituted with alkyl of from one to six carbon atoms, alkoxy of from one to six carbon atoms, or halogen, R₄ is selected from the group consisting of thiazolylalkyloxy in which the alkyl portion contains from one to six carbon atoms, and the heteroaryl portion is optionally substituted with alkyl of from one to six carbon atoms, alkoxy of from one to six carbon atoms, or halogen, and thiazolyloxy optionally substituted with alkyl of from one to six carbon atoms, alkoxy of from one to six carbon atoms, or halogen. See U.S. Pat. No. 5,288,743, incorporated herein by reference.

[0136] The compound can be represented by the formula:

[chemical structure]

[0137] or a pharmaceutically acceptable salt thereof, wherein M is selected from the group consisting of hydrogen, and a pharmaceutically acceptable cation; B is a straight or branched divalent alkylene group of from one to twelve carbon atoms; Z is selected from the group consisting of: (a) furyl, optionally substituted with alkyl of from one to six carbon atoms, or haloalkyl of from one to six carbon atoms, and (b) thienyl, optionally substituted with alkyl of from one to six carbon atoms, or haloalkyl of from one to six carbon atoms; and L is alkylene of from 1-6 carbon atoms; A is phenyl optionally substituted with alkyl of from one to six carbon atoms, haloalkyl of from one to six carbon atoms, hydroxyalkyl of from one to six carbon atoms, alkoxy of from one to twelve carbon atoms, alkoxyalkoxyl in which the two alkoxy portions may each independently contain from one to six carbon atoms, alkylthio of from one to six carbon atoms, hydroxy, halogen, cyano, amino, alkylamino of from one to six carbon atoms, dialkylamino in which the two alkyl groups may independently contain from one to six carbon atoms, alkanoylamino of from two to eight carbon atoms, N-alkanoyl-N-alkylamino in which the alkanoyl is of from two to eight carbon atoms and the alkyl group is of from one to six carbon atoms, alkylaminocarbonyl of from two to eight carbon atoms, dialkylaminocarbonyl in which the two alkyl groups are independently of from one to six carbon atoms, carboxyl, alkoxycarbonyl of from two to eight carbon atoms, phenyl, optionally substituted with alkyl of from one to six carbon atoms, haloalkyl of from one to six carbon atoms, alkoxy of from one to six carbon atoms, hydroxy or halogen, phenoxy, optionally substituted with alkyl of from one to six carbon atoms, haloalkyl of from one to six carbon atoms, alkoxy of from one to six carbon atoms, hydroxy or halogen, or phenylthio, optionally substituted with alkyl of from one to six carbon atoms, haloalkyl of from one to six carbon atoms, alkoxy of from one to six carbon atoms, hydroxy or halogen. Preferably, the compound is a compound or a pharmaceutically acceptable salt thereof selected from the group consisting of: N-{3-(5-(4-fluorophenylmethyl)fur-2-yl)-3-butyn-2-yl}-N-hydroxyurea; N-{3-(5-(4-fluorophenylmethyl)-2-thienyl)-1-methyl-2-propynyl}-N-hydroxyurea; (R)—N-{3-(5-(4-fluorophenylmethyl)-2-thienyl)-1-methyl-2-propynyl}-N-hydroxyurea; and (R)—N-{3-(5-(4-chlorophenylmethyl)-2-thienyl)-1-methyl-2-propynyl}-N-hydroxyurea; (S)—N-{3-[5-(4-fluorophenylmethyl)-2-thienyl]-1-methyl-2-propynyl}-N-hydroxyurea. See U.S. Pat. No. 5,288,751, incorporated by reference herein.

[0138] The compound can be represented by the formula:

[chemical structure]

[0139] or a pharmaceutically acceptable salt thereof, wherein A is selected from the group consisting of straight or branched divalent alkylene of one to twelve carbon atoms, straight or branched divalent alkenylene of two to twelve carbon atoms, and divalent cycloalkylene of three to eight carbon atoms; R¹ is alkylthio of one to six carbon atoms; R⁶ is selected from the group consisting of hydrogen and alkyl of one to six carbon atoms; R⁷ is selected from the group consisting of (carboxyl)alkyl in which the alkyl portion is of one to six carbon atoms, (alkoxycarbonyl)alkyl in which the alkoxycarbonyl portion is of two to six carbon atoms and the alkyl portion is of one to six carbon atoms, (aminocarbonyl)alkyl in which the alkyl portion is of one to six carbon atoms, ((alkylamino)carbonyl)alkyl in which each alkyl portion independently is of one to six carbon atoms, and ((dialkylamino)carbonyl)alkyl in which each alkyl portion independently is of one to six carbon atoms; R³ is phenylalkyl in which the alkyl portion is of one to six carbon atoms; R⁴ is 2-, 3- or 6-quinolylmethoxy, optionally substituted with alkyl of one to six carbon atoms, haloalkyl of one to six carbon atoms, alkoxy of one to twelve carbon atoms, halogen, or hydroxy. Preferably, the compound is selected from the group consisting of: 3-(3-1,1-dimethylethylthio)-5-(quinolin-2-ylmethoxy-1-(4-chlorophenylmethyl )-indol-2-yl)-2,2-dimethylpropionaldehyde oxime-O-2 acetic acid; 3-(3-(1,1-dimethylethylthio)-5-(quinolin-2-ylmethoxy)-1-(4-chloro-phenylmethyl) indol-2-yl)-2,2-dimethylpropionaldehyde oxime-O-2-(3-methyl)butyric acid; 3-(3-(1,1-dimethylethylthio)-5-(6,7-dichloroquinolin-2-ylmethoxy)-1-(4-chlorophenylmethyl)indol-2-yl)-2,2-dimethylpropionaldehyde oxime-O-2-acetic acid; and 3-(3-(1,1-dimethylethylthio)-5-(6-fluoroquinolin-2-ylmethoxy)-1-(4chlorophenylmethyl) indol-2-yl)-2,2-dimethylpropionaldehyde oxime-O-2-propionic acid; or a pharmaceutically acceptable salt or ester thereof. See U.S. Pat. No. 5,459,150, incorporated by reference herein.

[0140] The compound can be represented by the formula:
Q¹—X—Ar—Q²

[0141] or pharmaceutically acceptable salts thereof, wherein Q is a 9-, 10- or 11-membered bicyclic heterocyclic moiety containing one or two nitrogen heteroatoms and optionally containing a further heteroatom selected from nitrogen, oxygen and sulphur, and Q may optionally bear up to four substituents selected from halogeno, hydroxy, cyano, formyl, oxo, thioxo, (1-4C)alkyl, (3-4C)alkenyl, (3-4C)alkynyl, (1-4C)alkoxy, fluoro-(1-4C)alkyl, hydroxy-(1-4C)alkyl, (2-5C)alkanoyl, phenyl, benzoyl and benzyl, and wherein said phenyl, benzoyl and benzyl substituents may optionally bear one or two substituents selected from halogeno, (1-4C)alkyl and (1-4C)alkoxy; X is oxy, thio, sulphinyl or sulphonyl; Ar is phenylene, pyridinediyl, pyrimidinediyl, thiophenediyl, furandiyl, thiazolediyl, oxazolediyl, thiadiazolediyl or oxadiazolediyl which may optionally bear one or two substituents selected from halogeno, cyano, trifluoromethyl, hydroxy, amino, (1-4C)alkyl, (1-4C)alkoxy, (1-4C)alkylamino and di-(1-4C)alkylamino; and Q is selected from the groups of the formulae II and III:

[chemical structure]

[0142] wherein R is hydrogen, (2-5C)alkanoyl or benzoyl, and wherein said benzoyl group may optionally bear one or two substituents selected from halogeno, (1-4C)alkyl and (1-4C)alkoxy; R is (1-4C)alkyl; and R is hydrogen or (1-4C)alkyl; or R and R are linked to form a methylene, vinylene, ethylene or trimethylene group. Preferably, the compound is selected from the group consisting of: (2S,4R)-4-[5-fluoro-3-(1-methyl-2-oxo-1,2,3,4-tetrahydroquinolin-6-ylthio)phenyl]-4-hydroxy-2-ethyltetrahydropyran, (2S,4R)-4-[5-fluoro-3-(1-methyl-2-oxo-1,2,3,4-tetrahydroquinolin-6-ylsulphonyl)phenyl]-4-hydroxy-2-methyltetrahydropyran, (2S,4R)-4-hydroxy-2-methyl-4-[2-(1-methyl-2-oxo-1,2,3,4-tetrahydroquinolin-6-ylthio)thiazol-5-yl]tetrahydropyran, (2S,4R)-4-hydroxy-2-methyl-4-[2-(1-methyl-2-oxo-1,2,3,4-tetrahydroquinolin-6-ylsulphonyl)thiazol-5-yl]tetrahydropyran, (2S,4R)-4-[2-(7-fluoro-1-methyl-2-oxo-1,2,3,4-tetrahydroquinolin-6-ylthio)thiazol-5-yl]-4-hydroxy-2-methyltetrahydropyran, (2S,4R)-4-hydroxy-2-methyl-4-[2-(1-methyl-2-oxoindolin-5-ylthio)thiazol-5-yl]tetrahydropyran, (2S,4R)-4-hydroxy-2-methyl-4-[2-(1-methyl-2-oxo-1,2,3,4-tetrahydroquinolin-6-ylthio)thien-4-yl]tetrahydropyran, (2S,4R)-4-hydroxy-2-methyl-4-[2-(1-methyl-2-oxo-1,2,3,4-tetrahydroquinolin-6-ylsulphonyl)thien-4-yl]tetrahydropyran, (2S,4R)-4-hydroxy-2-methyl-4-[2-(1-methyl-2-oxo-1,2,3,4-tetrahydroquinolin-6-ylthio)thien-5-yl]tetrahydropyran, (2S,4R)-4-hydroxy-2-methyl-4-[2-(1-methyl-2-oxo-1,2-dihydroquinolin-6-ylthio)thien-4-yl]tetrahydropyran, (2S,4R)-4-hydroxy-2-methyl-4-[2-(1,8-dimethyl-2-oxo-1,2,3,4-tetrahydroquinolin-6-ylthio)thien-4-yl]tetrahydropyran, 4-[2-(8-fluoro-1-methyl-2-oxo-1,2,3,4-tetrahydroquinolin-6-ylthio)thien-4-yl]-4-hydroxy-2-methyltetrahydropyran, 4-[2-(7-fluoro-1-methyl-2-oxo-1,2,3,4-tetrahydroquinolin-6-ylthio)thien-4-yl]-4-hydroxy-2-methyltetrahydropyran, (2S,4R)-4-hydroxy-2-methyl-4-[2-(1-methyl-2-oxoindolin-5-ylthio)thien-4-yl]tetrahydropyran, (2S,4R)-4-hydroxy-2-methyl-4-[3-(1-methyl-2-oxo-1,2,3,4-tetrahydroquinolin-6-ylthio)phenyl]tetrahydropyran, (2S,4R)-4-hydroxy-2-methyl-4-[3-(1-methyl-2-oxo-1,2,3,4-tetrahydroquinolin-6-ylsulphonyl)phenyl]tetrahydropyran, (2S,4R)-4-[3-(1-ethyl-2-oxo-1,2,3,4-tetrahydroquinolin-6-ylthio)phenyl]-4-hydroxy-2-methyltetrahydropyran, (2S,4R)-4-[3-(7-fluoro-1-methyl-2-oxo-1,2,3,4-tetrahydroquinolin-6-ylthio)phenyl]-4-hydroxy-2-methyltetrahydropyran, (2S,4R)-4-hydroxy-2-methyl-4-[3-(1-methyl-2-oxo-1,2-dihydroquinolin-6-ylthio)phenyl]tetrahydropyran, (2S,4R)-4-[3-(8-chloro-1-methyl-2-oxo-1,2,3,4-tetrahydroquinolin-6-ylthio)phenyl]-4-hydroxy-2-methyltetrahydropyran and (2S,4R)-4-hydroxy-2-methyl-4-[3-(1-methyl-2-oxoindolin-5-ylthio)phenyl]tetrahydropyran. See EP 623614 B1, incorporated herein by reference.

[0143] The compound can be represented by the formula:

[chemical structure]

[0144] wherein Q is a 10-membered bicyclic heterocyclic moiety containing one or two nitrogen heteroatoms which bears one or two thioxo substituents, and which heterocyclic moiety may optionally bear one, two or three further substituents selected from halogeno, hydroxy, cyano, amino, (1-4C)alkyl, (1-4C)alkoxy, fluoro-(1-4C)alkyl, (1-4C)alkylamino, di-[(1-4C)alkyl]amino, amino-(1-4C)alkyl, (1-4C)alkylamino-(1-4C)alkyl, di-[(1-4C)alkyl]amino-(1-4C)alkyl, phenyl and phenyl-(1-4C)alkyl, and wherein said phenyl or phenyl-(1-4C)alkyl substituent may optionally bear a substituent selected from halogeno, (1-4C)alkyl and (1-4C)alkoxy; wherein A is a direct link to X or is (1-3C)alkylene; wherein X is oxy, thio, sulphinyl, sulphonyl or imino; wherein Ar is phenylene which may optionally bear one or two substituents selected from halogeno, hydroxy, amino, nitro, cyano, carbamoyl, ureido, (1-4C)alkyl, (1-4C)alkoxy, (1-4C)alkylamino, di-[(1-4C)alkyl]amino, fluoro-(1-4C)alkyl and (2-4C)alkanoylamino; or Ar is pyridylene; wherein R is (1-4C)alkyl, (3-4C)alkenyl or (3-4C)alkynyl; and wherein R and R together form a group of the formula -A-X-A- which, together with the carbon atom to which A and A are attached, defines a ring having 5 to 7 ring atoms, wherein A and A, which may be the same or different, each is (1-3C)alkylene and X is oxy, thio, sulphinyl or sulphonyl, and which ring may bear one, two or three substituents, which may be the same or different, selected from hydroxy, (1-4C)alkyl and (1-4C)alkoxy; or wherein R and R together form a group of the formula -A-X-A- which, together with the oxygen atom to which A is attached and with the carbon atom to which A is attached, defines a ring having 5 to 7 ring atoms, wherein A and A, which may be the same or different, each is (1-3C)alkylene and X is oxy, thio, sulphinyl or sulphonyl, and which ring may bear one, two or three (1-4C)alkyl substituents, and wherein R is (1-4C)alkyl, (2-4C)alkenyl or (2-4C)alkynyl; or a pharmaceutically-acceptable salt thereof. Preferably, the compound is selected from the group consisting of: 4-(5-fluoro-3-(1-methyl-2-thioxo-1,2-dihydroquinolin-6-ylmethoxy)phenyl]-4-ethoxytetrahydropyran and 4-(5-fluoro-3-(1-methyl-2-thioxo-1,2,3,4-tetrahydroquinolin-6-1methoxy)phenyl]-4-methoxytetrahydropyran, 4-(5-fluoro-3-(1-methyl-2-thioxo-1,2,3,4-tetrahydroquinolin-6-ylthio)phenyl]-4-methoxytetrahydropyran and pharmaceutically-acceptable salt thereof. See EP 466452 B1, incorporated herein by reference.

[0145] The compound can be a substituted 4-(quinolin-2-61-methoxy)phenylacetic acid derivative represented by the following formula:

[chemical structure]

[0146] or pharmaceutically acceptable salt thereof, wherein R¹ represents a group of the formula:

[chemical structure]

[0147] R² and R³ are identical or different and represent hydrogen, lower alkyl, phenyl, benzyl or a group of the formula:

[chemical structure]

[0148] R⁴ represents hydrogen, lower alkyl, phenyl or benzyl, which can optionally be substituted by hydroxyl, carboxyl, lower alkoxycarbonyl, lower alkylthio, heteroaryl or carbamoyl, R⁵ represents hydrogen, lower alkyl, phenyl or benzyl, R⁶ represents a group of the formula —COR⁵ or —CO² R⁵, R⁷ represents hydrogen, lower alkyl or phenyl, Y represents a group of the formula:

[chemical structure]

[0149] wherein R⁸ represents hydrogen, lower alkyl or phenyl and n denotes a number of 0 to 5, Z represents norbornyl, or represents a group of the formula:

[chemical structure]

[0150] wherein R⁹ and R¹⁰ are identical or different and denote hydrogen, lower alkyl or phenyl, or R⁹ and R¹⁰ can together form a saturated carbocyclic ring having up to 6 carbon atoms and m denotes a number from 1 to 6, and A and B are identical or different and denote hydrogen, lower alkyl or halogen, or a pharmaceutically acceptable salt thereof. Preferably the compounds are selected from the group consisting of: 2-[4-(quinolin-2-yl-methoxy)phenyl]-2-cyclopentylacetic acid, 2-[4-(quinolin-2-yl-methoxy)phenyl]-2-cyclohexylacetic acid, and 2-[4-(quinolin-2-yl-methoxy)phenyl]-2-cycloheptylacetic acid, (+)-enantiomer of 2-[4-(quinolin-2-yl-methoxy)phenyl]-2-cyclopentylacetic acid, (−)-enantiomer of 2-[4-(quinolin-2-yl-methoxy)phenyl]-2-cyclopentylacetic acid and pharmaceutically acceptable salts thereof. See U.S. Pat. No. 4,970,215, incorporated herein by reference.

[0151] The compound can be represented by the formula:

[chemical structure]

[0152] wherein R, R, R, R and R are independently hydrogen, halogen, lower alkyl, lower alkenyl, lower alkynyl, —CF3, —CN, —NO2, —N3, —C(OH)RR, —CO2R, —SR,

[0153] —S(O)R, —S(O)2R, —S(O)2NRR, —OR, —NRR, —C(O)R or —(CH2)tR; R is hydrogen,

[0154] —CH3, —CF3, —C(O)H, X—R or X—R; R and R are independently: alkyl, —(CH2)uPh(R)2 or —(CH2)uTh(R)2; R is —CF3 or R; R is hydrogen or X—R; each R is independently hydrogen or lower alkyl, or two R's on same carbon atom are joined to form a cycloalkyl ring of 3 to 6 carbon atoms; R is hydrogen, lower alkyl or —CH2R; R is lower alkyl or —(CH2)rR; R is —CF3 or R; R is hydrogen, —C(O)R, R, or two R's on the same nitrogen may be joined to form a monocyclic heterocyclic ring of 4 to 6 atoms containing up to 2 heteroatoms chosen from O, S or N; R is hydrogen, —CF3, lower alkyl, lower alkenyl, lower alkynyl or —(CH2)rR; R is —(CH2)s-C(RR)—(CH2)s-R or —CH2C(O)NRR; R is hydrogen or lower alkyl; R is a) a monocyclic or bicyclic heterocyclic ring containing from 3 to 9 nuclear carbon atoms and 1 or 2 nuclear hetero-atoms selected from N, S or O and with each ring in the heterocyclic radical being formed of 5 or 6 atoms, or b) the radical W—R; R is alkyl or C(O)R; R is phenyl substituted with 1 or 2 R groups; R is hydrogen, halogen, lower alxyl, lower alkoxy, lower alkylthio, lower alkylsulfonyl, lower alkylcarbonyl, —CF3, —CN,

[0155] —NO2 or —N3; R is alkyl, cycloalkyl, monocyclic monoheterocyclic ring;

[0156] R is the residual structure of a standard amino acid, or R and R attached to the same N can cyclize to form a proline residue; m is 0 to 1; n is 0 to 3; p is 1 to 3 when m is 1; p is 0 to 3 when m is 0; r is 0 to 2; s is 0 to 3; t is 0 to 2; u is 0 to 3; v is 0 or 1;

[0157] W is 0, S or NR; X is 0, or NR; X is C(O), CRR, S, S(O) or S(O)2; X is C(O), CRR, S(O)2 or a bond; Y is X or X; Q is —CO2R, —C(O)NHS(O)2R, —NHS(O)2R,

[0158] —S(O)2NHR —C(O)NRR, —CO2R, —C(O)NRR, —CH2OH, or 1H— or 2H-tetrazol-5-yl; and the pharmaceutically acceptable salts thereof. Preferred embodiments of the compounds are selected from the following and pharmaceutically acceptable salts thereof:

[0159] 3-[N-(p-chlorobenzyl)-3-(t-butylthio)-5-(quinolin-2-ylmethoxy)indol-2-yl]-2,2-dimethylpropanoic acid; 3-[N-(p-chlorobenzyl)-3-methyl-5-(quinolin-2-ylmethoxy)indol-2-yl]-2,2-dimethylpropanoic acid; 3-[N-(p-t-butylthiobenzyl)-3-(t-butylthio)-5-(quinolin-2-ylmethoxy)indol-2-yl]-2,2-dimethylpropanoic acid; 3-[N-(p-chlorobenzyl)-3-(phenylthio)-5-(quinolin-2-ylmethoxy)indol-2-yl]-2,2-dimethylpropanoic acid; 3-[N-(p-chlorobenzyl)-3-(phenylsulfonyl)-5-(quinolin-2-ylmethoxy)indol-2-yl]-2,2-dimethyl propanoic acid, N-oxide; 3-[N-(p-chlorobenzyl)-3-(phenylsulfonyl)-5-(quinolin-2-ylmethoxy)indol-2-yl]-2,2-dimethylpropanoic acid; 3-[N-(p-chlorobenzyl)-3-(phenylsulfinyl)-5-(quinolin-2-ylmethoxy)indol-2-yl]-2,2-dimethylpropanoic acid; 3-[N-(p-chlorobenzyl)-5-(quinolin-2-ylmethoxy)indol-2-yl]-2,2-dimethylpropanoic acid; 3-[N-(p-chlorobenzyl)-3-benzoyl-5-(quinolin2-ylmethoxy)indol-2-yl]-2,2-dimethylpropanoic acid; 3-[N-(p-chlorobenzyl)-3-benzyl-5-(quinolin-2-ylmethoxy)indol-2-yl]-2,2-dimethylpropanoic acid; 3-[N-(p-chlorobenzyl)-3-(3,3-dimethyl-1-oxo-1-butyl)-5-(quinolin-2-ylmethoxy)indol-2-yl]-2,2-dimethylpropanoic acid; 2-[N-(p-chlorobenzyl)-3-(t-butylthio)-5-(quinolin-2-ylmethoxy)indol-2-yl]ethoxyethanoic acid; 3-[N-(p-chlorobenzyl)-3-(3,3-dimethyl-1-butyl)-5-(quinolin-2-ylmethoxy)indol-2-yl]-2,2-dimethylpropanoic acid; 3-[N-(p-chlorobenzyl)-3-(t-butylthio)-5-(quinolin-2-ylmethoxy)indol-2-yl]-2-dimethylpropanoic acid; 3-[N-(p-chlorobenzyl)-3-methyl-5-(6,7-dichloroquinolin-2-ylmethoxy)indol-2-yl]-2,2-dimethylpropanoic acid; 3-[N-(p-chlorobenzyl)-3-methyl-5-(7-chloroquinolin-2-ylmethoxy)indol-2-yl]-2,2-dimethylpropanoic acid; 3-[N-(p-chlorobenzyl)-4-allyl-5-(quinolin-2-ylmethoxy)-3-(t-butylthio)indol-2-yl]-2,2-dimethylpropanoic acid; 3-[N-(p-chlorobenzyl)-4-allyl-5-(quinolin-2-ylmethoxy)indol-2-yl]-2,2-dimethylpropanoic acid; 3-[N-(p-chlorobenzyl)-6-(quinolin-2-ylmethoxy)-3-(t-butylthio)indol-2-yl]-2,2-dimethylpropanoic acid; 3-[N-(p-chlorobenzyl)-4-(quinolin-2-ylmethoxy)-3-(t-butylthio)indol-2-yl]-2,2-dimethylpropanoic acid; 3-[N-(p-chlorobenzyl)-7-(quinolin-2-ylmethoxy)-3-(t-butylthio)indol-2-yl]-2,2-dimethylpropanoic acid; 2-[2-[N-(p-chlorobenzyl)-3-(t-butylthio)-5-(quinolin-2-ylmethoxy)indol-2-yl]ethoxy]propanoic acid; 3-[N-(p-chlorobenzyl)-4-(quinolin-2-ylmethoxy)indol-2-yl]-2,2-dimethylpropanoic acid; 3-[N-methyl-3-(p-chlorobenzoyl)-6-(quinolin-2-ylmethoxy)indol-2-yl]-2,2-dimethylpropanoic acid, 3-[N-methyl-3-(p-chlorobenzyl)-6-(quinolin-2-ylmethoxy)indol-2-yl]-2,2-dimethylpropanoic acid, 3-[N-(4-chlorobenzyl)-3-i-propoxy-5-(quinolin-2-ylmethoxy)indol-2-yl]-2,2-dimethylpropanoic acid, 3-[N-(4-chlorobenzyl)-3-(t-butylthio)-5-(quinolin-2-yl-methoxy)indol-2-yl]-2-ethylpropanoic acid, 3-[N-(4-chlorobenzyl)-3-trifluoroacetyl-5-(quinolin-2-ylmethoxy)indol-2-yl]-2,2-dimethylpropanoic acid, 3-[N-(4-chlorobenzyl)-3-(3,3-dimethyl-1-oxo-1-butyl)-5-(quinolin-2-ylmethoxy)indol-2-yl]-2-methylpropanoic acid, 3-[3-(3,3-dimethyl-1-oxo-1-butyl-5-(quinolin-2-ylmethoxy)indol-2-yl]-2,2-dimethylpropanoic acid, 3-[N-(4-triflouromethylbenzyl)-3-(3,3-dimethyl-1-oxo-1-butyl)-5-(quinolin-2-yl-methoxy)indol-2-yl]-2,2-dimethylpropanoic acid, 3-[N-benzyl-3-(3,3-dimethyl-1-oxo-1-butyl)-5-(quinolin-2-ylmethoxy)indol-2-yl]-2,2-dimethylpropanoic acid, 3-[N-(3-methoxybenzyl)-3-(3,3-dimethyl-1-oxo-1-butyl)-5-(quinolin-2-ylmethoxy)indol-2-yl]-2,2-dimethylpropanoic acid, 3-[N-allyl-3-(3,3-dimethyl-1-oxo-1-butyl)-5-(quinolin-2-ylmethoxy)indol-2-yl]-2,2-dimethylpropanoic acid, 3-[N-(4-methoxybenzyl)-3-(3,3-dimethyl-1-oxo-1-butyl)-5-(quinolin-2-ylmethoxy)indol-2-yl]-2,2-dimethylpropanoic acid, 3-[N-methyl-3-(3,3-dimethyl-1-oxo-3-butyl)-5-(quinolin-2-ylmethoxy)indol-2-yl]-2,2-dimethylpropanoic acid, 3-[3-(4-chlorobenzyl)-6-(quinolin-2-ylmethoxy)indol-2-yl]-2,2-dimethylpropanoic acid. 3-[N-(phenylsulfonyl)-3-(4-chlorobenzyl)-6-(quinolin-2-ylmethoxy)indol-2-yl]-2,2-dimethylpropanoic acid, 3-[N-benzyl-3-(4-chlorobenzyl)-6-(quinolin-2-ylmethoxy)indol-2-yl]-2,2-dimethylpropanoic acid, 3-[N-(4-chlorobenzyl)-3-(t-butylsulfonyl)-5-(quinolin-2-ylmethoxy)indol-2-yl]-2,2-dimethylpropanoic acid, 3-[N-(4-chlorobenzyl)-3-(t-butylsulfinyl)-5-(quinolin-2-ylmethoxy)indol-2-yl]-2,2-dimethylpropanoic acid, 3-[N-allyl-3-(4-chlorobenzyl)-6-(quinolin-2-ylmethoxy)indol-2-yl]-2,2-dimethylpropanoic acid, 3-[N-(n-propyl)-3-(4-chlorobenzyl)-6-(quinoline-2-ylmethoxy)indol-2-yl]-2,2-dimethylpropanoic acid, 3-[N-ethyl-3-(4-chlorobenzyl)-6-(quinolin-2-ylmethoxy)indol-2-yl]-2,2-dimethylpropanoic acid, 3-[N-(4-chlorobenzyl)-3-(4-t-butylbenzoyl)-5-(quinolin-2-yl-methoxy)indol-2-yl]-2,2-dimethylpropanoic acid, 3-[N-(4-chlorobenzyl)-3-(4-chlorobenzoyl)-5-(quinolin-2-ylmethoxy)indol-2-yl]-2,2-dimethylpropanoic acid, 3-[N-(4-chlorobenzyl)-3-(1,1-dimethylethyl)-5-(quinolin-2-ylmethoxy)indol-2-yl]-2,2-dimethylpropanoic acid, 3-[N-(4-chlorobenzyl)-3-acetyl-5-(quinolin-2-ylmethoxy)indol-2-yl]-2,2-dimethylpropanoic acid 3-[N-(4-chlorobenzyl)-3-cyclopropanecarbonyl-5-(quinolin-2-ylmethoxy)indol-2-yl]-2,2-dimethylpropanoic acid, 3-[N-(4-chlorobenzyl)-3-(3-cyclopentylpropanoyl)-5-(quinolin-2-ylmethoxy)indol-2-yl]-2,2-dimethylpropanoic acid, 3-[N-(4-chlorobenzyl)-3-(3-methylbutanoyl)-5-(quinolin-2-yl-methoxy)indol-2-yl]-2,2-dimethylpropanoic acid, 3-[N-(4-chlorobenzyl)-3-propanoyl-5-(quinolin-2-ylmethoxy)indol-2-yl]-2,2-dimethylpropanoic acid, 3-[N-(4-chlorobenzyl)-3-(2-methylpropanoyl)-5-(quinolin-2-ylmethoxy)indol-2-yl]-2,2-dimethylpropanoic acid, 3-[N-(4-chlorobenzyl)-3-trimethylacetyl-5-(quinolin-2-ylmethoxy)indol-2-yl]-2,2-dimethylpropanoic acid, 3-[N-(4-chlorobenzyl)-3-phenylacetyl-5-(quinolin-2-ylmethoxy)indol-2-yl]-2,2-dimethylpropanoic acid, 3-[N-(4-fluorobenzyl)-3-(3,3-dimethyl-1-oxo-1-butyl)-5-(quinolin-2-ylmethoxy)indol-2-yl]-2,2-dimethylpropanoic acid, 3-[N-(4-bromobenzyl)-3-(3,3-dimethyl-1-oxo-1-butyl)-5-(quinolin-2-ylmethoxy)indol-2-yl]-2,2-dimethylpropanoic acid, 3-[N-(4-iodobenzyl)-3-(3,3-dimethyl-1-oxo-1-butyl)-5-(quinolin-2-ylmethoxy)indol-2-yl]-2,2-dimethylpropanoic acid, 3-[N-(4-chlorobenzyl)-3-(1,1-dimethylbutyl)-5-(quinolin-2-ylmethoxy)indol-2-yl]-2,2-dimethylpropanoic acid, 3-[N-(4-chlorobenzyl)-3-(1,1-dimethylpropyl)-5-(quinolin-2-ylmethoxy)indol-2-yl]-2,2-dimethylpropanoic acid, 3-[N-(3-fluorobenzyl)-3-(1,1-dimethylethyl)-5-(quinolin-2-ylmethoxy)indol-2-yl]-2,2-dimethylpropanoic acid, 3-[N-(4-chlorobenzyl)-3-(3-methylethyl)-5-(quinolin-2-ylmethoxy)indol-2-yl]-2,2-dimethylpropanoic acid, 3-[N-(4-chlorobenzyl)-3-cyclopropyl-5-(quinolin-2-ylmethoxy)indol-2-yl]-2,2-dimethylpropanoic acid, 3-[N-(4-chlorobenzyl)-3-(1-methyl-1-cyclopropyl)-5-(quinolin-2-ylmethoxy)indol-2-yl]-2,2-dimethylpropanoic acid, 3-[N-(4-chlorobenzyl)-3-cyclopentyl-5-(quinolin-2-ylmethoxy)indol-2-yl]-2,2-dimethylpropanoic acid, 3-[N-(4-chlorobenzyl)-3-cyclohexyl-5-(quinolin-2-ylmethoxy)indol-2-yl]-2,2-dimethylpropanoic acid, 3-[N-(4-chlorobenzyl)-3-(alpha, alpha-dimethylbenzyl)-5-(quinolin-2-ylmethoxy)indol-2-yl]-2,2-dimethylpropanoic acid, 3-[N-(4-chlorobenzyl)-3-(2-{4-chloro-alpha, alpha-dimethylbenzyl}-5-(quinolin-2-ylmethoxy)indol-2-yl]-2,2-dimethylpropanoic acid, 3-[N-(4-chlorobenzyl)-3-(1-adamantyl)-5-(quinolin-2-ylmethoxy)indol-2-yl]-2,2-dimethylpropanoic acid, 3-[N-(4-chlorobenzyl)-3-((1-adamantyl)methyl)-5-(quinolin-2-ylmethoxy)indol-2-yl]-2,2-dimethylpropanoic acid, 3-[N-(1,1-dimethylethyl)-3-(4-chlorobenzyl)-6-(quinolin-2-ylmethoxy)indol-2-yl]-2,2-dimethylpropanoic acid, 3-[N-(1,1-dimethylpropyl)-3-(4-chlorobenzyl)-6-(quinoline-2-ylmethoxy)indol-2-yl]-2,2-dimethylpropanoic acid, 3-[N-(4-chlorobenzyl)-3-(3,3-dimethyl-1-oxo-1-butyl)-5-(quinolin-2-ylmethoxy)indol-2-yl]-2,2-diethylpropanoic acid, methyl 3-[N-(4-chlorobenzyl)-3,6-bis(acetyl)-5-(quinolin-2-ylmethoxy)indol-2-yl]-2,2 dimethyl propanoate or methyl 3-[N-(4-chlorobenzyl)-3,6-bis(cyclopropanecarbonyl)-5-(quinolin-2-ylmethoxy)indol-2-yl]-2,2-dimethyl propanoate. See EP 419049 B1, incorporated herein by reference.

[0160] The term “alkyl” refers to a monovalent group derived from a straight or branched chain saturated hydrocarbon by the removal of a single hydrogen atom. Alkyl groups are exemplified by methyl, ethyl, n- and iso-propyl, n-, sec-, iso- and tert-butyl, and the like. The term “hydroxyalkyl” represents an alkyl group, as defined above, substituted by one to three hydroxyl groups with the proviso that no more than one hydroxy group may be attached to a single carbon atom of the alkyl group. The term “alkylamino” refers to a group having the structure —NHR′ wherein R′ is alkyl, as previously defined, examples of alkylamino include methylamino, ethylamino, iso-propylamino and the like. The term “alkylaminocarbonyl” refers to an alkylamino group, as previously defined, attached to the parent molecular moiety through a carbonyl group. Examples of alkylaminocarbonyl include methylamino-carbonyl, ethylaminocarbonyl, iso-propylaminocarbonyl and the like. The term “alkylthio” refers to an alkyl group, as defined above, attached to the parent molecular moiety through a sulfur atom and includes such examples as methylthio, ethylthio, propylthio, n-, sec- and tert-butylthio and the like. The term “alkanoyl” represents an alkyl group, as defined above, attached to the parent molecular moiety through a carbonyl group. Alkanoyl groups are exemplified by formyl, acetyl, propionyl, butanoyl and the like. The term “alkanoylamino” refers to an alkanoyl group, as previously defined, attached to the parent molecular moiety through a nitrogen atom. Examples of alkanoylamino include formamido, acetamido, and the like. The term “N-alkanoyl-N-alkylamino” refers to an alkanoyl group, as previously defined, attached to the parent molecular moiety through an aminoalkyl group. Examples of N-alkanoyl-N-alkylamino include N-methylformamido, N-methyl-acetamido, and the like. The terms “alkoxy” or “alkoxyl” denote an alkyl group, as defined above, attached to the parent molecular moiety through an oxygen atom. Representative alkoxy groups include methoxyl, ethoxyl, propoxyl, butoxyl, and the like. The term “alkoxyalkoxyl” refers to an alkyl group, as defined above, attached through an oxygen to an alkyl group, as defined above, attached in turn through an oxygen to the parent molecular moiety. Examples of alkoxyalkoxyl include methoxymethoxyl, methoxyethyoxyl, ethoxyethoxyl and the like. The term “alkoxyalkyl” refers to an alkoxy group, as defined above, attached through an alkylene group to the parent molecular moiety. The term “alkoxycarbonyl” represents an ester group; i.e., an alkoxy group, attached to the parent molecular moiety through a carbonyl group such as methoxycarbonyl, ethoxycarbonyl, and the like. The term “alkenyl” denotes a monovalent group derived from a hydrocarbon containing at least one carbon-carbon double bond by the removal of a single hydrogen atom. Alkenyl groups include, for example, ethenyl, propenyl, butenyl, 1-methyl-2-buten-1-yl and the like. The term “alkylene” denotes a divalent group derived from a straight or branched chain saturated hydrocarbon by the removal of two hydrogen atoms, for example methylene, 1,2-ethylene, 1,1-ethylene, 1,3-propylene, 2,2-dimethylpropylene, and the like. The term “alkenylene” denotes a divalent group derived from a straight or branched chain hydrocarbon containing at least one carbon-carbon double bond. Examples of alkenylene include —CH═CH—, —CH₂ CH═CH—, —C(CH₃)═CH—, —CH₂ CH═CHCH₂—, and the like. The term “cycloalkylene” refers to a divalent group derived from a saturated carbocyclic hydrocarbon by the removal of two hydrogen atoms, for example cyclopentylene, cyclohexylene, and the like. The term “cycloalkyl” denotes a monovalent group derived from a monocyclic or bicyclic saturated carbocyclic ring compound by the removal of a single hydrogen atom. Examples include cyclopropyl, cyclobutyl, cyclopentyl, cyclohexyl, bicyclo[2.2.1]heptanyl, and bicyclo[2.2.2]octanyl. The term “alkynylene” refers to a divalent group derived by the removal of two hydrogen atoms from a straight or branched chain acyclic hydrocarbon group containing a carbon-carbon triple bond. Examples of alkynylene include —CH≡CH—, —CH≡CH—CH₂—, —CH≡CH—CH(CH₃)—, and the like. The term “carbocyclic aryl” denotes a monovalent carbocyclic ring group derived by the removal of a single hydrogen atom from a monocyclic or bicyclic fused or non-fused ring system obeying the “4n+2 p electron” or Huckel aromaticity rule. Examples of carbocyclic aryl groups include phenyl, 1- and 2-naphthyl, biphenylyl, fluorenyl, and the like. The term “(carbocyclic aryl)alkyl” refers to a carbocyclic aryl ring group as defined above, attached to the parent molecular moiety through an alkylene group. Representative (carbocyclic aryl)alkyl groups include phenylmethyl, phenylethyl, phenylpropyl, 1-naphthylmethyl, and the like. The term “carbocyclicarylalkoxy” refers to a carbocyclicaryl alkyl group, as defined above, attached to the parent molecular moiety through an oxygen atom. The term “carbocyclic aryloxyalkyl” refers to a carbocyclic aryl group, as defined above, attached to the parent molecular moiety through an oxygen atom and thence through an alkylene group. Such groups are exemplified by phenoxymethyl, 1- and 2-naphthyloxymethyl, phenoxyethyl and the like. The term “(carbocyclic aryl)alkoxyalkyl” denotes a carbocyclic aryl group as defined above, attached to the parent molecular moiety through an alkoxyalkyl group. Representative (carbocyclic aryl)alkoxyalkyl groups include phenylmethoxymethyl, phenylethoxymethyl, 1- and 2-naphthylmethoxyethyl, and the like. “Carbocyclic arylthioalkyl” represents a carbocyclic aryl group as defined above, attached to the parent molecular moeity through a sulfur atom and thence through an alklyene group and are typified by phenylthiomethyl, 1- and 2-naphthylthioethyl and the like. The term “dialkylamino” refers to a group having the structure —NR′R″ wherein R′ and R″ are independently selected from alkyl, as previously defined. Additionally, R′ and R″ taken together may optionally be —(CH₂)ₖₖ— where kk is an integer of from 2 to 6. Examples of dialkylamino include, dimethylamino, diethylaminocarbonyl, methylethylamino, piperidino, and the like. The term “halo or halogen” denotes fluorine, chlorine, bromine or iodine. The term “haloalkyl” denotes an alkyl group, as defined above, having one, two, or three halogen atoms attached thereto and is exemplified by such groups as chloromethyl, bromoethyl, trifluoromethyl, and the like. The term “hydroxyalkyl” represents an alkyl group, as defined above, substituted by one to three hydroxyl groups with the proviso that no more than one hydroxy group may be attached to a single carbon atom of the alkyl group. The term “phenoxy” refers to a phenyl group attached to the parent molecular moiety through an oxygen atom. The term “phenylthio” refers to a phenyl group attached to the parent molecular moiety through a sulfur atom. The term “pyridyloxy” refers to a pyridyl group attached to the parent molecular moiety through an oxygen atom. The terms “heteroaryl” or “heterocyclic aryl” as used herein refers to substituted or unsubstituted 5- or 6-membered ring aromatic groups containing one oxygen atom, one, two, three, or four nitrogen atoms, one nitrogen and one sulfur atom, or one nitrogen and one oxygen atom. The term heteroaryl also includes bi-or tricyclic groups in which the aromatic heterocyclic ring is fused to one or two benzene rings. Representative heteroaryl groups are pyridyl, thienyl, indolyl, pyrazinyl, isoquinolyl, pyrrolyl, pyrimidyl, benzothienyl, furyl, benzo[b]furyl, imidazolyl, thiazolyl, carbazolyl, and the like. The term “heteroarylalkyl” denotes a heteroaryl group, as defined above, attached to the parent molecular moiety through an alkylene group. The term “heteroaryloxy” denotes a heteroaryl group, as defined above, attached to the parent molecular moiety through an oxygen atom. The term “heteroarylalkoxy” denotes a heteroarylalkyl group, as defined above, attached to the parent molecular moiety through an oxygen atom.

### Method of Reducing Risk Factors For Cardiovascular Disease

[0161] The present invention encompasses compositions and methods for reducing risk factors for MI, ACS, stroke, and/or PAOD. The method of reducing risk factors comprise administering a composition comprising a leukotriene synthesis inhibitor, described in detail herein alone, or in combination with a statin, to an individuals at risk for any of these conditions. Individuals at risk include the target population described herein, especially individuals with elevated CRP, and those at risk for other diseases and conditions associated with FLAP and/or other members of the leukotriene pathway. In particular, the invention encompasses methods of reducing plasma CRP levels or plasma serum amyloid A levels comprising administering an effective amount of leukotriene inhibitor alone or in combination with a statin.

[0162] Statins are competitive inhibitors of 3-hydroxy-3-methylglutarlcoenzyme A (HMG-CoA) reductase, the enzyme that converts HMG-CoA to the cholesterol precursor mevalonic acid. Upon binding to the active site of HMG-CoA reducatase, statins alter the conformation of the enzyme, thereby preventing it from attaining a functional structure. The conformational change of the HMG-CoA reducatase active site makes statin drugs very effective and specific. Inhibition of HMG-CoA reducatase reduces intracellular cholesterol synthesis in hepatocytes. The reduction of intracellular cholesterol results in an increase in hepatic LDL receptors on the cell surface, which in turn reduces the level of circulating LDL and its precursors, intermediate density lipoproteins (IDL) and very low density lipoproteins (VLDL). In addition, statins inhibit hepatic synthesis of apolipoprotein B-100, which results in a decrease in the synthesis and secretion of triglyercide rich lipoproteins. Additional beneficial effects of statins on lipid biosynthesis include inhibition of LDL oxidation, and inhibition of the expression of scavenger receptors. Statins also reduce the accumulation of esterified cholersterol into macrophages, increase endothelial cell nitric oxide synthesis, reduce inflammatory processes, increase the stability of artherosclerotic plaques, and restore platelet activity and the coagulation process.

[0163] Because of their beneficial effects and high specificity, statins have become some of the most prescribed medicines in the Western industrialized world. In preferred embodiments of the invention, the statin is one of the following agents: rovuvastatin, fluvastatin, atorvastatin, lovastatin, simvastatin, pravastatin or pitavastatin. These agents are described in detail in the Statin Agent Table III below.

| | | | | | | | (Infor from |
|---|---|---|---|---|---|---|---|
| | Approved | | | | | | PDR) |
| | St | | | | | | Dosages |
| Resigeeter | Marketed | | | | | | (tablet |
| to | as | Stain Name | Chemical | Structure | U.S. Pat. No. | Patent Expiration | sizes) |
| Astra- Zeneca | CREST- OR | ROVU- VASTATIN | bis(E)-7-[4-(4-fluoro- phenyl)-6-isopropyl-2-[meth- yl(methylsulfonyl)amino]py- rimidin-5-yl](3R,5S)-3,5-di- hydroxyhept-6-enoic acid]calcium salt | [chemical structure] | 6316460 6589959 RE37314 | AUG. 04, 2020 DEC. 23, 2019 JUN. 12, 2012 | 5 mg, |
| #10 mg, 20 mg and 40 mg | | | | | | | |
| Novartis | LESCOL | FLUVASTATIN | [R*,S*-(E)]-(±)-7-[3-(4-fluoro- phenyl)-1-(1-meth- ylethyl)-1H-indol-2-yl]-3,5-di- hydroxy-6-heptenoic acid, monosodium salt | [chemical structure] | 5354772 5354772 5356896 | OCT. 11, 2011 OCT. 22, 2011 DEC. 12, 2011 | EQ 20 mg and EQ 40 mg |
| Pfizer | LIPITOR | ATOR- VASTATIN | [R-(R*,R*)]-2-(4-fluorophenyl)-(beta), [dgr]-dihy- droxy-5-(1-methylethyl)-3-phe- nyl-4-[(phenylamino)carbonyl]-1H-pyr- role-1-heptanoic acid, calcium salt (2:1)trihydrate | [chemical structure] | 4681893 4681893*PED 5273995 5273995*PED 5686104 5686104*PED | | |
| #5969156 5969156*PED 6126971 6126971*PED | SEP. 24, 2009 MAR. 24, 2010 DEC. 28, 2010 JUN 28, 2011 NOV. 11, 2014 MAY 11, 2015 JUL. 08, 2016 JAN. 08, 2017 JAN. 19, 2013 JUL. 19, 2013 | EQ 10 mg, EQ 20 mg, EQ 40 mg and EQ 40 mg | | | | | |
| MERCK | MEVA- COR | LOVASTATIN | [1,S-[1(alpha)(R*),3(al- pha),7(beta),8(beta)(2S*,4S*),8a(bet- a)]]-1,2,3,7,8,8a-hexa- hydro-3,7-di- methyl-8-[2-(tetra- hydro-4-hydroxy-6-ox- o-2H-pyran-2-yl)ethyl]-1-naph- thalenyl2-methylbutanoate | [chemical structure] | There are no unexpired patents for this product in the Orange Book | | |
| #Database. | 10 mg, 20 mg and 40 mg | | | | | | |
| MERCK | ZOCOR | SIMVASTATIN | butanoic acid, 2,2-dimethyl-,1,2,3,7,8,8a-hexa- hydro-3,7-di- methyl-8-[2-(tetrahydro-4-hy- droxy-6-oxo-2H-py- ran-2-yl)-ethyl]-1-naph- thalenyl ester,[1S-[1(al- pha),3(alpha),7(bet- a),8(beta)(2S*,4S*),-8a(beta)]]. | [chemical structure] | 4444784 4444784*PED | DEC. 23, 2005 JUN. 23, 2006 | 5 mg, 10 mg, 20 mg, |
| #40 mg and 80 mg | | | | | | | |
| BMS | PRAVA- COL | PRAVASTATIN | 1-Naphthalene-heptanoic acid, 1,2,6,7,8,8a-hexa- hydro-(beta),(delta),6-tri- hydroxy-2-methyl-8-(2-methyl-1-oxo- butoxy)-,monosodium salt,[1S-[1(al- pha)((beta)S*,(delta)S*),2(alpha),6(al- pha),8(beta)(R*),8a(alpha)]]-. | [chemical structure] | 4346227 4346227*PED 5030447 5030447*PED | | |
| #5180589 5180589*PED 5622985 5622985*PED | OCT. 20, 2005 APR. 20, 2006 JUL. 09, 2008 JAN. 09, 2009 JUL. 09, 2008 JAN. 09, 2009 APR. 22, 2014 OCT. 22, 2014 | 10 mg, 20 mg, 40 mg and 80 mg | | | | | |
| | Livalo | Pitavastatin | [chemical structure] | [chemical structure] | | | |
| Astra- Zeneca | CREST- OR | ROVU- VASTATIN | bis[(E)-7-[4-(4-fluoro- phenyl)-6-isopropyl 2-[methyl)(methylsulfonyl)amino]py- rimidin-5-yl](3R,5S)-di- hydroxyhept-6-enoic acid]calcium salt | [chemical structure] | 6316460 6589959 RE37314 | AUG. 04, 2020 DEC. 23, 2019 JUN. 12, 2012 | 5 mg, 10 |
| #mg, 20 mg and 40 mg | | | | | | | |
| Novartis | LESCOL | FLUVASTATIN | [R*,S*-(E)]-(±)-7-[3-(4-fluoro- phenyl)-1-(1-meth- ylethyl)-1H-indol-2-yl]-3,5-di- hydroxy-6-heptenoic acid, monosodium salt | [chemical structure] | 5354772 5354772 5356896 | OCT. 11, 2011 OCT. 11, 2011 DEC. 12, 2011 | EQ 20 mg and EQ 40 mg |
| Pfizer | LIPITOR | ATOR- VASTATIN | [R-(R*,R*)]-2-(4-fluorophenyl)-(beta), [dgr]-dihy- droxy-5-(1-methylethyl)-3-phe- nyl-4-[(phenylamino)carbonyl]-1H-pyr- role-1-heptanoic acid, calcium salt (2:1)trihydrate | [chemical structure] | 4861893 4861893*PED 5273995 5273995*PED 5686104 5686104*PED | | |
| #5969156 5969156*PED 6126971 6126971*PED | SEP. 24, 2009 MAR. 24, 2010 DEC. 28, 2010 JUN. 28, 2011 NOV. 11, 2014 MAY 11, 2015 JUL. 08, 2016 JAN. 08, 2017 JAN. 19, 2013 JUL. 19, 2013 | EQ 10 mg, EQ 20 mg, EQ 40 mg and EQ 40 mg | | | | | |
| MERCK | MEVA- COR | LOVASTATIN | [1S-[1(alpha)(R*),3(al- pha),7(beta),8(beta)(2S*,4S*),8a(bet- a)]]-1,2,3,7,8,8a-hexahydro-3,7-di- methyl-8-[2-(tetra- hydro-4-hydroxy-6-ox- o-2H-pyran-2-yl)ethyl]-1-naph- thalenyl2-methylbutanoate | [chemical structure] | There are no unexpired patents for this product in the Orange Book | | |
| #Database. | 10 mg, 20 mg and 40 mg | | | | | | |
| MERCK | ZOCOR | SIMVASTATIN | butanoic acid,2,2-di- methyl-,1,2,3,7,8,8a-hexa- hydro-3,7-dimeth- yl-8-[2-(tetrahydro-4-hy- droxy-6-oxo-2H-py- ran-2-yl)-ethyl]-1-naph- thalenyl ester,[1S-[1(al- pha),3(alpha),7(bet- a),8(beta)(2S*,4S*),-8a(beta)]]. | [chemical structure] | 4444784 4444784*PED | DEC. 23, 2005 JUN. 23, 2006 | 5 mg, 10 mg, 20 mg, |
| #40 mg and 80 mg | | | | | | | |
| BMS | PRAVA- COL | PRAVASTATIN | 1-Naphthelene-heptanoic acid, 1,2,6,7,8,8a-hexa- hydro-(beta),(delta),6-tri- hydroxy-2-methyl-8-(2-methyl-1-oxo- butoxy)-,monosodium salt,[1S-[1(al- pha)(beta)S*,(delta)S*),2(alpha),6(al- pha),8(beta)(R*),8a(alpha)]]-. | [chemical structure] | 4346227 4346227*PED 5030447 5030447*PED | | |
| #5180589 5180589*PED 5622985 5622985*PED | OCT. 20, 2005 APR. 20, 2006 JUL. 09, 2008 JAN. 09, 2009 JUL. 09, 2008 JAN. 09, 2009 APR. 22, 2014 OCT. 22, 2014 | 10 mg, 20 mg, 40 mg and 80 mg | | | | | |
| | Livalo | Pitavastatin | [chemical structure] | [chemical structure] | | | |

[0164] Mevastatin and related compounds are disclosed in U. S. Pat. No. 3,983,140. Lovastatin (mevinolin) and related compounds are disclosed in U.S. Pat. No. 4,231,938. Keto analogs of mevinolin (lovastatin) are disclosed in European Patent Application No. 0,142,146 A2, and quinoline and pyridine derivatives are disclosed in U.S. Pat. Nos. 5,506,219 and 5,691,322.

[0165] Pravastatin and related compounds are disclosed in U.S. Pat. No. 4,346,227. Simvastatin and related compounds are disclosed in U.S. Pat. Nos. 4,448,784 and 4,450,171.

[0166] Fluvastatin and related compounds are disclosed in U.S. Pat. No. 5,354,772. Cerivastatin and related compounds are disclosed in U.S. Pat. Nos. 5,006,530 and 5,177,080. Atorvastatin and related compounds are disclosed in U.S. Pat. Nos. 4,681,893; 5,273,995; 5,385,929 and 5,686,104.

[0167] Pitavastatin (nisvastatin (NK-104) or itavastatin) and related compounds are disclosed in U.S. Pat. No. 5,011,930. Rosuvastatin (visastatin (ZD-4522)) and related compounds are disclosed in U.S. Pat. No. 5,260,440.

[0168] Other possible HMG CoA reductase molecules are described in U.S. Pat. Nos. 5,753,675; 4,613,610; 4,686,237; 4,647,576; and 4,499,289; and British patent no. GB 2205837.

[0169] The patents cited in relation to statins or other agents identified herein describe how to make and use the statins/agents, as well as biochemically active homologs thereof, salts, pro-drugs, metabolites, and the like. Such patents are incorporated herein by reference in their entirety. Dosings for the statins also have been described in patent and trade literature (e.g., Physician's Desk Reference 2004, incorporated herein by reference) and by the manufacturers and clinical practitioners that prescribe them. Combination therapy using statin dosings similar to what is used when prescribing statins alone, or less, is specifically contemplated.

[0170] Compositions comprising a leukotriene synthesis inhibitor alone or in combination with a statin may comprises a leukotriene synthesis inhibitor in an amount effective to reduce a risk factor such as CRP or serum amyloid A. Effective daily doses of the leukotriene synthesis inhibitors are between 0.01 mg and 100 g, more preferably 0.1 mg to 1 g, and all individual doses within these ranges are specifically contemplated. Exemplary single adult doses include 10 mg, 25 mg, 50 mg, 75 mg, 100 mg, 150 mg, 200 mg, 250 mg, 300 mg, 350 mg, 400 mg, 500 mg and 750 mg, from one to four times daily. The compositions may comprise a statin in an amount effective to reduce total serum cholesterol, serum LDL, and/or serum CRP. Effective daily doses are between 0.01 mg and 100 g, more preferably 0.1 mg to 1 g, and all individual doses within these ranges are specifically contemplated. Exemplary individual doses include 5 mg, 10 mg, 15 mg, 20 mg, 30 mg, 40 mg 50 mg, 60 mg, and 80 mg, 100 mg, 150 mg, 200 mg, 250 mg, and 500 mg, from one to four times daily.

[0171] Emerging evidence suggests that elevated CRP is an independent risk factor for adverse clinical outcomes. See, e.g., Ridker et al., N. Engl. J. Med. 352: 1 (Jan. 6, 2005). In another variation, the invention provides compositions, unit doses, and methods of treatment where a leukotriene synthesis inhibitor and a statin are included or administered in amounts that synergistically act to reduce serum CRP levels. Synergistically effective amounts are amounts that either (a) achieve a greater percentage reduction in CRP than is achieved in an average patient using either type of agent alone, at a safe and effective amount, or (b) reduces CRP a comparable amount to single agent therapy, with fewer side effects; or (c) reduces CRP a comparable amount to single agent therapy, and also reduces at least one other cardiovascular-risk factor more effectively than single agent therapy alone.

[0172] In one variation, the invention provides a composition comprising a leukotriene synthesis inhibitor and a statin for simultaneous administration, e.g., in one dose. A composition in tablet, pill, or capsule form, including sustained release formulations, are specifically contemplated. In another variation, a unit dose comprising a single dose of the leukotriene synthesis inhibitor and a single dose of the statin, packaged together but not in admixture, is contemplated. In another variation, methods of the invention involve administering a composition comprising a leukotriene inhibitor and a composition comprising a statin at the same or different times, e.g., administering the leukotriene synthesis inhibitor before or after administration of a composition comprising a statin. Compositions for and methods of administering the agents to an individual continuously (e.g., through a patch or i.v.), one to twelve times a day, once a day, every other day, twice a week, weekly, or monthly for one or more weeks, months, or years, or for the entire life of a patient, depending on the level of risk for the individual, is specifically contemplated, to manage serum CRP and other cardiovascular risk factor levels. It is contemplated that these compositions will be used for treatment and lifestyle management plans for primary or secondary MI, ACS, stroke, or PAOD prevention.

### Nucleic Acid Therapeutic Agents

[0173] In another embodiment, a nucleic acid of the invention; a nucleic acid complementary to a nucleic acid of the invention; or a portion of such a nucleic acid (e.g., an oligonucleotide as described below); or a nucleic acid encoding a member of the leukotriene pathway (e.g., 5-LO), can be used in “antisense” therapy, in which a nucleic acid (e.g., an oligonucleotide) which specifically hybridizes to the mRNA and/or genomic DNA of a nucleic acid is administered or generated in situ. The antisense nucleic acid that specifically hybridizes to the mRNA and/or DNA inhibits expression of the polypeptide encoded by that mRNA and/or DNA, e.g., by inhibiting translation and/or transcription. Binding of the antisense nucleic acid can be by conventional base pair complementarity, or, for example, in the case of binding to DNA duplexes, through specific interaction in the major groove of the double helix.

[0174] An antisense construct can be delivered, for example, as an expression plasmid as described above. When the plasmid is transcribed in the cell, it produces RNA that is complementary to a portion of the mRNA and/or DNA that encodes the polypeptide for the member of the leukotriene pathway (e.g., FLAP or 5-LO). Alternatively, the antisense construct can be an oligonucleotide probe that is generated ex vivo and introduced into cells; it then inhibits expression by hybridizing with the mRNA and/or genomic DNA of the polypeptide. In one embodiment, the oligonucleotide probes are modified oligonucleotides that are resistant to endogenous nucleases, e.g., exonucleases and/or endonucleases, thereby rendering them stable in vivo. Exemplary nucleic acid molecules for use as antisense oligonucleotides are phosphoramidate, phosphothioate and methylphosphonate analogs of DNA (see also U.S. Pat. Nos. 5,176,996, 5,264,564 and 5,256,775). Additionally, general approaches to constructing oligomers useful in antisense therapy are also described, for example, by Van der Krol et al. (Biotechniques 6:958-976 (1988)); and Stein et al (Cancer Res. 48:2659-2668 (1988)). With respect to antisense DNA, oligodeoxyribonucleotides derived from the translation initiation site are preferred.

[0175] To perform antisense therapy, oligonucleotides (mRNA, cDNA or DNA) are designed that are complementary to mRNA encoding the polypeptide. The antisense oligonucleotides bind to mRNA transcripts and prevent translation. Absolute complementarity, although preferred, is not required. A sequence “complementary” to a portion of an RNA, as referred to herein, indicates that a sequence has sufficient complementarity to be able to hybridize with the RNA, forming a stable duplex; in the case of double-stranded antisense nucleic acids, a single strand of the duplex DNA may thus be tested, or triplex formation may be assayed. The ability to hybridize will depend on both the degree of complementarity and the length of the antisense nucleic acid, as described in detail above. Generally, the longer the hybridizing nucleic acid, the more base mismatches with an RNA it may contain and still form a stable duplex (or triplex, as the case may be). One skilled in the art can ascertain a tolerable degree of mismatch by use of standard procedures.

[0176] The oligonucleotides used in antisense therapy can be DNA, RNA, or chimeric mixtures or derivatives or modified versions thereof, single-stranded or double-stranded. The oligonucleotides can be modified at the base moiety, sugar moiety, or phosphate backbone, for example, to improve stability of the molecule, hybridization, etc. The oligonucleotides can include other appended groups such as peptides (e.g. for targeting host cell receptors in vivo), or agents facilitating transport across the cell membrane (see, e.g., Letsinger et al., Proc. Natl. Acad. Sci. USA 86:6553-6556 (1989); Lemaitre et al., Proc. Natl. Acad. Sci. USA 84:648-652 (1987); PCT International Publication No. WO 88/09810) or the blood-brain barrier (see, e.g., PCT International Publication No. WO 89/10134), or hybridization-triggered cleavage agents (see, e.g., Krol et al., BioTechniques 6:958-976 (1988)) or intercalating agents. (See, e.g., Zon, Pharm. Res. 5: 539-549 (1988)). To this end, the oligonucleotide may be conjugated to another molecule (e.g., a peptide, hybridization triggered cross-linking agent, transport agent, hybridization-triggered cleavage agent).

[0177] The antisense molecules are delivered to cells that express the member of the leukotriene pathway in vivo. A number of methods can be used for delivering antisense DNA or RNA to cells; e.g., antisense molecules can be injected directly into the tissue site, or modified antisense molecules, designed to target the desired cells (e.g., antisense linked to peptides or antibodies that specifically bind receptors or antigens expressed on the target cell surface) can be administered systematically. Alternatively, in a preferred embodiment, a recombinant DNA construct is utilized in which the antisense oligonucleotide is placed under the control of a strong promoter (e.g., pol III or pol II). The use of such a construct to transfect target cells in the patient results in the transcription of sufficient amounts of single stranded RNAs that will form complementary base pairs with the endogenous transcripts and thereby prevent translation of the mRNA. For example, a vector can be introduced in vivo such that it is taken up by a cell and directs the transcription of an antisense RNA. Such a vector can remain episomal or become chromosomally integrated, as long as it can be transcribed to produce the desired antisense RNA. Such vectors can be constructed by recombinant DNA technology methods standard in the art and described above. For example, a plasmid, cosmid, YAC or viral vector can be used to prepare the recombinant DNA construct that can be introduced directly into the tissue site. Alternatively, viral vectors can be used which selectively infect the desired tissue, in which case administration may be accomplished by another route (e.g., systemically).

[0178] In another embodiment of the invention, small double-stranded interfering RNA (RNA interference (RNAi)) can be used. RNAi is a post-transcription process, in which double-stranded RNA is introduced, and sequence-specific gene silencing results, though catalytic degradation of the targeted mRNA. See, e.g., Elbashir, S. M. et al., Nature 411:494-498 (2001); Lee, N. S., Nature Biotech. 19:500-505 (2002); Lee, S-K. et al., Nature Medicine 8(7):681-686 (2002); the entire teachings of these references are incorporated herein by reference. RNAi is used routinely to investigate gene function in a high throughput fashion or to modulate gene expression in human diseases (Chi et al., PNAS, 100 (11):6343-6346 (2003)). Introduction of long double standed RNA leads to sequence-specific degradation of homologous gene transcripts. The long double stranded RNA is metabolized to small 21-23 nucleotide siRNA (small interfering RNA). The siRNA then binds to protein complex RISC (RNA-induced silencing complex) with dual function helicase. The helicase has RNA as activity and is able to unwind the RNA. The unwound si RNA allows an antisense strand to bind to a target. This results in sequence dependent degradation of cognate mRNA. Aside from endogenous RNAi, exogenous RNAi, chemically synthesized or recombinantly produced can also be used. Using non-intronic portions of the FLAP gene, such as corresponding mRNA portions of SEQ ID NO. 1, or portions of SEQ ID NO: 3, target regions of the FLAP gene that are accessible for RNAi are targeted and silenced. With this technique it is possible to conduct a RNAi gene walk of the nucleic acids of the FLAP gene and determine the amount of inhibition of the protein product. Thus it is possible to design gene-specific therapeutics by directly targeting the mRNAs of the gene.

[0179] Endogenous expression of a member of the leukotriene pathway (e.g., FLAP, 5-LO) can also be reduced by inactivating or “knocking out” the gene or its promoter using targeted homologous recombination (e.g., see Smithies et al., Nature 317:230-234 (1985); Thomas & Capecchi, Cell 51:503-512 (1987); Thompson et al., Cell 5:313-321 (1989)). For example, an altered, non-functional gene of a member of the leukotriene pathway (or a completely unrelated DNA sequence) flanked by DNA homologous to the endogenous gene (either the coding regions or regulatory regions of the gene) can be used, with or without a selectable marker and/or a negative selectable marker, to transfect cells that express the gene in vivo. Insertion of the DNA construct, via targeted homologous recombination, results in inactivation of the gene. The recombinant DNA constructs can be directly administered or targeted to the required site in vivo using appropriate vectors, as described above. Alternatively, expression of non-altered genes can be increased using a similar method: targeted homologous recombination can be used to insert a DNA construct comprising a non-altered functional gene, or the complement thereof, or a portion thereof, in place of a gene in the cell, as described above. In another embodiment, targeted homologous recombination can be used to insert a DNA construct comprising a nucleic acid that encodes a polypeptide variant that differs from that present in the cell.

[0180] Alternatively, endogenous expression of a member of the leukotriene pathway can be reduced by targeting deoxyribonucleotide sequences complementary to the regulatory region of the member of the leukotriene pathway (i.e., the promoter and/or enhancers) to form triple helical structures that prevent transcription of the gene in target cells in the body. (See generally, Helene, C., Anticancer Drug Des., 6(6):569-84 (1991); Helene, C. et al., Ann. N. Y. Acad. Sci. 660:27-36 (1992); and Maher, L. J., Bioassays 14(12):807-15 (1992)). Likewise, the antisense constructs described herein, by antagonizing the normal biological activity of one of the members of the leukotriene pathway, can be used in the manipulation of tissue, e.g., tissue differentiation, both in vivo and for ex vivo tissue cultures. Furthermore, the anti-sense techniques (e.g., microinjection of antisense molecules, or transfection with plasmids whose transcripts are anti-sense with regard to a nucleic acid RNA or nucleic acid sequence) can be used to investigate the role of one or more members of the leukotriene pathway in the development of disease-related conditions. Such techniques can be utilized in cell culture, but can also be used in the creation of transgenic animals.

[0181] The therapeutic agents as described herein can be delivered in a composition, as described above, or by themselves. They can be administered systemically, or can be targeted to a particular tissue. The therapeutic agents can be produced by a variety of means, including chemical synthesis; recombinant production; in vivo production (e.g., a transgenic animal, such as U.S. Pat. No. 4,873,316 to Meade et al.), for example, and can be isolated using standard means such as those described herein. In addition, a combination of any of the above methods of treatment (e.g., administration of non-altered polypeptide in conjunction with antisense therapy targeting altered mRNA for a member of the leukotriene pathway; administration of a first splicing variant in conjunction with antisense therapy targeting a second splicing variant) can also be used.

[0182] The invention additionally pertains to use of such therapeutic agents, as described herein, for the manufacture of a medicament for the treatment of MI, ACS, stroke, PAOD and/or atherosclerosis, e.g., using the methods described herein.

### Monitoring Progress of Treatment

[0183] The current invention also pertains to methods of monitoring the response of an individual, such as an individual in one of the target populations described above, to treatment with a leukotriene synthesis inhibitor.

[0184] Because the level of inflammatory markers can be elevated in individuals who are in the target populations described above, an assessment of the level of inflammatory markers of the individual both before, and during, treatment with the leukotriene synthesis inhibitor will indicate whether the treatment has successfully decreased production of leukotrienes in the arterial vessel wall or in bone-marrow derived inflammatory cells. For example, in one embodiment of the invention, an individual who is a member of a target population as described above (e.g., an individual at risk for MI, ACS, stroke or PAOD, such as an individual who is at-risk due to a FLAP haplotype) can be assessed for response to treatment with a leukotriene synthesis inhibitor, by examining leukotriene levels or leukotriene metabolite levels in the individual. Blood, serum, plasma or urinary leukotrienes (e.g., leukotriene E4, cysteinyl leukotriene 1), or ex vivo production of leukotrienes (e.g., in blood samples stimulated with a calcium ionophore to produce leukotrienes), or leukotriene metabolites, can be measured before, and during or after treatment with the leukotriene synthesis inhibitor. The leukotriene or leukotriene metabolite level before treatment is compared with the leukotriene or leukotriene metabolite level during or after treatment. The efficacy of treatment is indicated by a decrease in leukotriene production: a level of leukotriene or leukotriene metabolite during or after treatment that is significantly lower than the level of leukotriene or leukotriene metabolite before treatment, is indicative of efficacy. A level that is lower during or after treatment can be shown, for example, by decreased serum or urinary leukotrienes, or decreased ex vivo production of leukotrienes, or decreased leukotriene metabolites. A level that is “significantly lower”, as used herein, is a level that is less than the amount that is typically found in control individual(s), or is less in a comparison of disease risk in a population associated with the other bands of measurement (e.g., the mean or median, the highest quartile or the highest quintile) compared to lower bands of measurement (e.g., the mean or median, the other quartiles; the other quintiles).

[0185] For example, in one embodiment of the invention, the level of a leukotriene or leukotriene metabolite is assessed in an individual before treatment with a leukotriene synthesis inhibitor; and during or after treatment with the leukotriene synthesis inhibitor, and the levels are compared. A level of the leukotriene or leukotriene metabolite during or after treatment that is significantly lower than the level of the leukotriene or leukotriene metabolite before treatment, is indicative of efficacy of treatment with the leukotriene synthesis inhibitor. In another embodiment, production of a leukotriene or a leukotriene metabolite is stimulated in a first test sample from the individual, using a calcium ionophore, before treatment with a leukotriene synthesis inhibitor, and is also stimulated in a second test sample from the individual, using a calcium ionophore, during or after treatment with the leukotriene synthesis inhibitor, and the level of production in the first test sample is compared with with the level of production of the leukotriene or leukotriene metabolite in the second test sample. A level of the leukotriene or leukotriene metabolite in the second test sample that is significantly lower than the level of the leukotriene or leukotriene metabolite in the first test sample, is indicative of efficacy of treatment with the leukotriene synthesis inhibitor.

[0186] In another embodiment of the invention, an individual who is a member of a target population of individuals at risk for MI, ACS, stroke or PAOD (e.g., an individual in a target population described above, such as an individual at-risk due to elevated C-reactive protein) can be assessed for response to treatment with a leukotriene synthesis inhibitor, by examining levels of inflammatory markers in the individual. For example, levels of an inflammatory marker in an appropriate test sample (e.g., serum, plasma or urine) can be measured before, and during or after treatment with the leukotriene synthesis inhibitor. The level of the inflammatory marker before treatment is compared with the level of the inflammatory marker during or after treatment. The efficacy of treatment is indicated by a decrease in the level of the inflammatory marker, that is, a level of the inflammatory marker during or after treatment that is significantly lower (e.g., significantly lower), than the level of inflammatory marker before treatment, is indicative of efficacy. Representative inflammatory markers include: C-reactive protein (CRP), serum amyloid A, fibrinogen, a leukotriene (e.g., LTB4, LTC4, LTD4, LTE4), a leukotriene metabolite, interleukin-6, tissue necrosis factor-alpha, soluble vascular cell adhesion molecules (sVCAM), soluble intervascular adhesion molecules (sICAM), E-selectin, matrix metalloprotease type-1, matrix metalloprotease type-2, matrix metalloprotease type-3, matrix metalloprotease type-9, myeloperoxidase (MPO), and N-tyrosine. In a preferred embodiment, the marker is CRP or MPO.

[0187] The efficacy of treatment of a leukotriene synthesis inhibitor may be monitored by measuring at-risk biomarkers in plasma, serum or urine. Clinical assays are available for the following biomarkers: CRP, serum amyloid A, IL-1β, IL-6, IL-8, IL-10, TNF-α, E-selectin, P-selectin and intracellular adhesion molecule-1, vascular cell ashesion molecule-1. The relative risk of a cardiovascular event predicted by CRP levels is low risk has less thatn 1 mg/L, average is 1.0-3.0 mg/L and high risk patients have greater than 3.0 mg/L. Thus, optimal therapeutic effect of a leukotriene synthesis inhibitor alone or in combination with a statin is reducing CRP level to 2.0 mg/L or lower.

[0188] The efficacy of treatment of a statin is monitored by measuring the level of total serum cholesterol, serum LDL and/or serum triglycerides. A level of serum total cholesterol, LDL-C and/or triglycerides during or after treatment, which is significantly lower than the level of total cholesterol, LDL-C and/or triglycerides before treatment is indicative of the efficacy of the treatment. For cholesterol management purposes, “high risk patients” have an LDL level of 130 mg/Dl or higher and optimally the statin treatment will reduce the LDL level to less than 100 mg/dL. “Moderately-high risk patients” are those individuals with two or more risk factors for coronary heart disease with a 10-20% risk of heart attack within ten years. Optimally, the statin treatment will keep the LDL level under 129 mg/dL. More recent studies show an additional benefit on morbidity and mortality when statin therapy decreased serum LDL-C to less than 70 mg/dL. (Ridker et al., N. Engl. J. Med. 352(1): 20-28, 2005; Nissen et al., N. Engl. J. Med. 352(1): 29-38, 2005). Thus optimal therapeutic effect of a statin would be to lower LDL-C levels to under 70 mg/dL. as described by Ridker et al., N. Engl. J. Med. 352(1): 20-28, 2005 and Nissen et al., N. Engl. J. Med. 352(1): 29-38, 2005, statin therapy may reduce CRP. CRP is an additional parameter that may be monitored in connection with statin therapy.

### Assessment of Increased Risk

[0189] The present invention additionally pertains to methods for assessing an individual (e.g., an individual who is in a target population as described herein, such as an individual who is at risk for MI, ACS, stroke or PAOD), for an increased risk of MI, ACS, atherosclerosis, stroke, transient ischemic attack, transient monocular blindness, asymptomatic carotid stenosis, PAOD, claudication, or limb ischemia. The methods comprise assessing the level of a leukotriene metabolite (e.g., LTE4, LTD4, LTB4) in the individual, wherein an increased level of leukotriene metabolite is indicative of an increased risk. The level can be measured in any appropriate tissue or fluid sample, such as blood, serum, plasma, or urine. In one particular embodiment, the sample comprises neutrophils. The level of the leukotriene metabolite can be measured by standard methods, such as the methods described herein. For example, in one embodiment, production of a leukotriene metabolite is stimulated in a first test sample from the individual, using a calcium ionophore. The level of production is compared with a control level. The control level is a level that is typically found in control individual(s), such as individual who are not at risk for MI, ACS, stroke or PAOD; alternatively, a control level is the level that is found by comparison of disease risk in a population associated with the lowest band of measurement (e.g., below the mean or median, the lowest quartile or the lowest quintile) compared to higher bands of measurement (e.g., above the mean or median, the second, third or fourth quartile; the second, third, fourth or fifth quintile). A level of production of the leukotriene metabolite that is significantly greater than the control level, is indicative of an increased risk. Individuals at increased risk are candidates for treatments described herein.

### Pharmaceutical Compositions

[0190] The present invention also pertains to pharmaceutical compositions comprising agents described herein, for example, an agent that is a leukotriene synthesis inhibitor as described herein. For instance, a leukotriene synthesis inhibitor can be formulated with a physiologically acceptable carrier or excipient to prepare a pharmaceutical composition. The carrier and composition can be sterile. The formulation should suit the mode of administration.

[0191] The invention also provides for compositions comprising a leukotriene synthesis inhibit, as set out in Agent Table I, and a statin, as set out in the Agent Table III. The leukotriene synthesis inhibitor and the statin may be coformulated with a physiological acceptable carrier or expedient to prepare a pharmaceutical composition. This composition may be formulation to deliver the leukotriene synthesis inhibitor and statin in a single dose. The processes for the isolation and purification of statins and other HMG-CoA reductase inhibitors include different combinations of extraction, chromatography, lactonization and crystallization methods. Examples of formulations for statins, statin derivatives and statin salts are found in the following, all incorporated by reference in their entirety, U.S. Pat. Nos. 6,316,460, 6,589,959, RE37,314, 5,354,772, 5,356,896, 5,686,104, 5,969,156, 6,126,971, 5,030,447, 5,180,589, 5,622,985, 6,825,015, 6,838,566, 5,403,860, 5,763,653, and 5,763,646, International Patent Publications WO 86/03488, WO 86/07054, French Patent No. 2596393, European Patent Application No. 0221025, British Patent Nos. 2055100A and 2073199A and European Patent No. 65,835.

[0192] Suitable pharmaceutically acceptable carriers include but are not limited to water, salt solutions (e.g., NaCl), saline, buffered saline, alcohols, glycerol, ethanol, gum arabic, vegetable oils, benzyl alcohols, polyethylene glycols, gelatin, carbohydrates such as lactose, amylose or starch, dextrose, magnesium stearate, talc, silicic acid, viscous paraffin, perfume oil, fatty acid esters, hydroxymethylcellulose, polyvinyl pyrolidone, etc., as well as combinations thereof. The pharmaceutical preparations can, if desired, be mixed with auxiliary agents, e.g., lubricants, preservatives, stabilizers, wetting agents, emulsifiers, salts for influencing osmotic pressure, buffers, coloring, flavoring and/or aromatic substances and the like which do not deleteriously react with the active agents.

[0193] The composition, if desired, can also contain minor amounts of wetting or emulsifying agents, or pH buffering agents.. The composition can be a liquid solution, suspension, emulsion, tablet, pill, capsule, sustained release formulation, or powder. The composition can be formulated as a suppository, with traditional binders and carriers such as triglycerides. Oral formulation can include standard carriers such as pharmaceutical grades of mannitol, lactose, starch, magnesium stearate, polyvinyl pyrollidone, sodium saccharine, cellulose, magnesium carbonate, etc.

[0194] Methods of introduction of these compositions include, but are not limited to, intradermal, intramuscular, intraperitoneal, intraocular, intravenous, subcutaneous, topical, oral and intranasal. Other suitable methods of introduction can also include gene therapy (as described below), rechargeable or biodegradable devices, particle acceleration devices (“gene guns”) and slow release polymeric devices. The pharmaceutical compositions of this invention can also be administered as part of a combinatorial therapy with other agents.

[0195] The composition can be formulated in accordance with the routine procedures as a pharmaceutical composition adapted for administration to human beings. For example, compositions for intravenous administration typically are solutions in sterile isotonic aqueous buffer. Where necessary, the composition may also include a solubilizing agent and a local anesthetic to ease pain at the site of the injection. Generally, the ingredients are supplied either separately or mixed together in unit dosage form, for example, as a dry lyophilized powder or water free concentrate in a hermetically sealed container such as an ampule or sachette indicating the quantity of active agent. Where the composition is to be administered by infusion, it can be dispensed with an infusion bottle containing sterile pharmaceutical grade water, saline or dextrose/water. Where the composition is administered by injection, an ampule of sterile water for injection or saline can be provided so that the ingredients may be mixed prior to administration.

[0196] For topical application, nonsprayable forms, viscous to semi-solid or solid forms comprising a carrier compatible with topical application and having a dynamic viscosity preferably greater than water, can be employed. Suitable formulations include but are not limited to solutions, suspensions, emulsions, creams, ointments, powders, enemas, lotions, sols, liniments, salves, aerosols, etc., which are, if desired, sterilized or mixed with auxiliary agents, e.g., preservatives, stabilizers, wetting agents, buffers or salts for influencing osmotic pressure, etc. The agent may be incorporated into a cosmetic formulation. For topical application, also suitable are sprayable aerosol preparations wherein the active ingredient, preferably in combination with a solid or liquid inert carrier material, is packaged in a squeeze bottle or in admixture with a pressurized volatile, normally gaseous propellant, e.g., pressurized air.

[0197] Agents described herein can be formulated as neutral or salt forms.

[0198] Pharmaceutically acceptable salts include those formed with free amino groups such as those derived from hydrochloric, phosphoric, acetic, oxalic, tartaric acids, etc., and those formed with free carboxyl groups such as those derived from sodium, potassium, ammonium, calcium, ferric hydroxides, isopropylamine, triethylamine, 2-ethylamino ethanol, histidine, procaine, etc.

[0199] The agents are administered in a therapeutically effective amount. The amount of agents which will be therapeutically effective in the treatment of a particular disorder or condition will depend on the nature of the disorder or condition, and can be determined by standard clinical techniques. In addition, in vitro or in vivo assays may optionally be employed to help identify optimal dosage ranges. The precise dose to be employed in the formulation will also depend on the route of administration, and the seriousness of the symptoms, and should be decided according to the judgment of a practitioner and each patient's circumstances. Effective doses may be extrapolated from dose-response curves derived from in vitro or animal model test systems.

[0200] The invention also provides a pharmaceutical pack or kit comprising one or more containers filled with one or more of the ingredients of the pharmaceutical compositions of the invention. Optionally associated with such container(s) can be a notice in the form prescribed by a governmental agency regulating the manufacture, use or sale of pharmaceuticals or biological products, which notice reflects approval by the agency of manufacture, use of sale for human administration. The pack or kit can be labeled with information regarding mode of administration, sequence of drug administration (e.g., separately, sequentially or concurrently), or the like. The pack or kit may also include means for reminding the patient to take the therapy. The pack or kit can be a single unit dosage of the combination therapy or it can be a plurality of unit dosages. In particular, the agents can be separated, mixed together in any combination, present in a single vial or tablet. For example, a pack or kit of the invention may contain a single dose for delivery of both a leukotriene synthesis inhibitor and a statin concurrently, or contain two or more doses wherein one dose is to deliver a leukotriene synthesis inhibitor and one dose is to deliver a statin either in parallel or one following the other.

[0201] Agents assembled in a blister pack or other dispensing means is preferred. For the purpose of this invention, unit dosage is intended to mean a dosage that is dependent on the individual pharmacodynamics of each agent and administered in FDA approved dosages in standard time courses.

### Nucleic Acids of the Invention

### FLAP Nucleic Acids, Portions and Variants

[0202] In addition, the invention pertains to isolated nucleic acid molecules comprising a human FLAP nucleic acid. The term, “FLAP nucleic acid,” as used herein, refers to an isolated nucleic acid molecule encoding FLAP polypeptide. The FLAP nucleic acid molecules of the present invention can be RNA, for example, mRNA, or DNA, such as cDNA and genomic DNA. DNA molecules can be double-stranded or single-stranded; single stranded RNA or DNA can be either the coding, or sense strand or the non-coding, or antisense strand. The nucleic acid molecule can include all or a portion of the coding sequence of the gene or nucleic acid and can further comprise additional non-coding sequences such as introns and non-coding 3′ and 5′ sequences (including regulatory sequences, for example, as well as promoters, transcription enhancement elements, splice donor/acceptor sites, etc.).

[0203] For example, a FLAP nucleic acid can consist of SEQ ID NOs: 1 or 3 or the complement thereof, or to a portion or fragment of such an isolated nucleic acid molecule (e.g., cDNA or the nucleic acid) that encodes FLAP polypeptide (e.g., a polypeptide such as SEQ ID NO: 2). In a preferred embodiment, the isolated nucleic acid molecule comprises a nucleic acid molecule selected from the group consisting of SEQ ID NOs: 1 or 3, or their complement thereof.

### LTA4H Nucleic Acids, Portions and Variant

[0204] In addition, the invention pertains to isolated nucleic acid molecules comprising a human LTA4H nucleic acid. The term, “LTA4H nucleic acid,” as used herein, refers to an isolated nucleic acid molecule encoding LTA4H polypeptide. The LTA4H nucleic acid molecules of the present invention can be RNA, for example, mRNA, or DNA, such as cDNA and genomic DNA. DNA molecules can be double-stranded or single-stranded; single stranded RNA or DNA can be either the coding, or sense strand or the non-coding, or antisense strand. The nucleic acid molecule can include all or a portion of the coding sequence of the gene or nucleic acid and can further comprise additional non-coding sequences such as introns and non-coding 3′ and 5′ sequences (including regulatory sequences, for example, as well as promoters, transcription enhancement elements, splice donor/acceptor sites, etc.).

[0205] For example, an LTA4H nucleic acid can consist of SEQ ID NOs: 718 or 719 or the complement thereof, or to a portion or fragment of such an isolated nucleic acid molecule (e.g., cDNA or the nucleic acid) that encodes LTA4H polypeptide (e.g., a polypeptide such as SEQ ID NO: 720). In a preferred embodiment, the isolated nucleic acid molecule comprises a nucleic acid molecule selected from the group consisting of SEQ ID NOs: 718 or 719, or their complement thereof.

[0206] Additionally, the nucleic acid molecules of the invention can be fused to a marker sequence, for example, a sequence that encodes a polypeptide to assist in isolation or purification of the polypeptide. Such sequences include, but are not limited to, those that encode a glutathione-S-transferase (GST) fusion protein and those that encode a hemagglutinin A (HA) polypeptide marker from influenza.

[0207] An “isolated” nucleic acid molecule, as used herein, is one that is separated from nucleic acids that normally flank the gene or nucleic acid sequence (as in genomic sequences) and/or has been completely or partially purified from other transcribed sequences (e.g., as in an RNA library). For example, an isolated nucleic acid of the invention may be substantially isolated with respect to the complex cellular milieu in which it naturally occurs, or culture medium when produced by recombinant techniques, or chemical precursors or other chemicals when chemically synthesized. In some instances, the isolated material will form part of a composition (for example, a crude extract containing other substances), buffer system or reagent mix. In other circumstances, the material may be purified to essential homogeneity, for example as determined by PAGE or column chromatography such as HPLC. In certain embodiments, an isolated nucleic acid molecule comprises at least about 50, 80 or 90% (on a molar basis) of all macromolecular species present. With regard to genomic DNA, the term “isolated” also can refer to nucleic acid molecules that are separated from the chromosome with which the genomic DNA is naturally associated. For example, the isolated nucleic acid molecule can contain less than about 5 kb, including but not limited to 4 kb, 3 kb, 2 kb, 1 kb, 0.5 kb or 0.1 kb of nucleotides which flank the nucleic acid molecule in the genomic DNA of the cell from which the nucleic acid molecule is derived.

[0208] The nucleic acid molecule can be fused to other coding or regulatory sequences and still be considered isolated. Thus, recombinant DNA contained in a vector is included in the definition of “isolated” as used herein. Also, isolated nucleic acid molecules include recombinant DNA molecules in heterologous host cells, as well as partially or substantially purified DNA molecules in solution. “Isolated” nucleic acid molecules also encompass in vivo and in vitro RNA transcripts of the DNA molecules of the present invention. An isolated nucleic acid molecule or nucleic acid sequence can include a nucleic acid molecule or nucleic acid sequence that is synthesized chemically or by recombinant means. Therefore, recombinant DNA contained in a vector is included in the definition of “isolated” as used herein. Also, isolated nucleotide sequences include recombinant DNA molecules in heterologous organisms, as well as partially or substantially purified DNA molecules in solution. In vivo and in vitro RNA transcripts of the DNA molecules of the present invention are also encompassed by “isolated” nucleotide sequences. Such isolated nucleotide sequences are useful in the manufacture of the encoded polypeptide, as probes for isolating homologous sequences (e.g., from other mammalian species), for gene mapping (e.g., by in situ hybridization with chromosomes), or for detecting expression of the nucleic acid in tissue (e.g., human tissue), such as by Northern blot analysis.

[0209] The present invention also pertains to nucleic acid molecules which are not necessarily found in nature but which encode a FLAP polypeptide (e.g., a polypeptide having an amino acid sequence comprising an amino acid sequence of SEQ ID NOs: 2), or another splicing variant of a FLAP polypeptide or polymorphic variant thereof. Thus, for example, DNA molecules that comprise a sequence that is different from the naturally occurring nucleic acid sequence but which, due to the degeneracy of the genetic code, encode a FLAP polypeptide of the present invention are also the subjects of this invention. The invention also encompasses nucleotide sequences encoding portions (fragments), or encoding variant polypeptides such as analogues or derivatives of a FLAP polypeptide. Such variants can be naturally occurring, such as in the case of allelic variation or single nucleotide polymorphisms, or non-naturally-occurring, such as those induced by various mutagens and mutagenic processes. Intended variations include, but are not limited to, addition, deletion and substitution of one or more nucleotides that can result in conservative or non-conservative amino acid changes, including additions and deletions. Preferably the nucleotide (and/or resultant amino acid) changes are silent or conserved; that is, they do not alter the characteristics or activity of a FLAP polypeptide. In one preferred embodiment, the nucleotide sequences are fragments that comprise one or more polymorphic microsatellite markers. In another preferred embodiment, the nucleotide sequences are fragments that comprise one or more single nucleotide polymorphisms in a FLAP nucleic acid (e.g., the single nucleotide polymorphisms set forth in Table 13, below).

[0210] The present invention also pertains to nucleic acid molecules which are not necessarily found in nature but which encode a LTA4H polypeptide (e.g., a polypeptide having an amino acid sequence comprising an amino acid sequence of SEQ ID NO: 720), or another splicing variant of a LTA4H polypeptide or polymorphic variant thereof. Thus, for example, DNA molecules that comprise a sequence that is different from the naturally occurring nucleic acid sequence but which, due to the degeneracy of the genetic code, encode a LTA4H polypeptide of the present invention are also the subjects of this invention. The invention also encompasses nucleotide sequences encoding portions (fragments), or encoding variant polypeptides such as analogues or derivatives of a LTA4H polypeptide. Such variants can be naturally occurring, such as in the case of allelic variation or single nucleotide polymorphisms, or non-naturally-occurring, such as those induced by various mutagens and mutagenic processes. Intended variations include, but are not limited to, addition, deletion and substitution of one or more nucleotides that can result in conservative or non-conservative amino acid changes, including additions and deletions. Preferably the nucleotide (and/or resultant amino acid) changes are silent or conserved; that is, they do not alter the characteristics or activity of a LTA4H polypeptide. In one preferred embodiment, the nucleotide sequences are fragments that comprise one or more polymorphic microsatellite markers. In another preferred embodiment, the nucleotide sequences are fragments that comprise one or more single nucleotide polymorphisms in a LTA4H nucleic acid (e.g., the single nucleotide polymorphisms set forth in Table 37, below).

[0211] Other alterations of the nucleic acid molecules of the invention can include, for example, labeling, methylation, internucleotide modifications such as uncharged linkages (e.g., methyl phosphonates, phosphotriesters, phosphoamidates, carbamates), charged linkages (e.g., phosphorothioates, phosphorodithioates), pendent moieties (e.g., polypeptides), intercalators (e.g., acridine, psoralen), chelators, alkylators, and modified linkages (e.g., alpha anomeric nucleic acids). Also included are synthetic molecules that mimic nucleic acid molecules in the ability to bind to a designated sequence via hydrogen bonding and other chemical interactions. Such molecules include, for example, those in which peptide linkages substitute for phosphate linkages in the backbone of the molecule.

[0212] The invention also pertains to nucleic acid molecules that hybridize under high stringency hybridization conditions, such as for selective hybridization, to a nucleic acid sequence described herein (e.g., nucleic acid molecules which specifically hybridize to a nucleic acid sequence encoding polypeptides described herein, and, optionally, have an activity of the polypeptide). In one embodiment, the invention includes variants described herein which hybridize under high stringency hybridization conditions (e.g., for selective hybridization) to a nucleic acid sequence comprising a nucleic acid sequence selected from the group consisting of SEQ ID NOs: 1, 3, 718 and 719 or the complement thereof. In another embodiment, the invention includes variants described herein which hybridize under high stringency hybridization conditions (e.g., for selective hybridization) to a nucleic acid sequence encoding an amino acid sequence of SEQ ID NO: 2, SEQ ID NO: 720 or a polymorphic variant thereof. In a preferred embodiment, the variant that hybridizes under high stringency hybridizations has an activity of a FLAP. In another preferred embodiment, the variant that hybridizes under high stringency hybridizations has an activity of a LTA4H.

[0213] Such nucleic acid molecules can be detected and/or isolated by specific hybridization (e.g., under high stringency conditions). “Specific hybridization,” as used herein, refers to the ability of a first nucleic acid to hybridize to a second nucleic acid in a manner such that the first nucleic acid does not hybridize to any nucleic acid other than to the second nucleic acid (e.g., when the first nucleic acid has a higher similarity to the second nucleic acid than to any other nucleic acid in a sample wherein the hybridization is to be performed). “Stringency conditions” for hybridization is a term of art which refers to the incubation and wash conditions, e.g., conditions of temperature and buffer concentration,.which permit hybridization of a particular nucleic acid to a second nucleic acid; the first nucleic acid may be perfectly (i.e., 100%) complementary to the second, or the first and second may share some degree of complementarity that is less than perfect (e.g., 70%, 75%, 85%, 95%). For example, certain high stringency conditions can be used which distinguish perfectly complementary nucleic acids from those of less complementarity. “High stringency conditions”, “moderate stringency conditions” and “low stringency conditions” for nucleic acid hybridizations are explained on pages 2.10.1-2.10.16 and pages 6.3.1-6.3.6 in Current Protocols in Molecular Biology (Ausubel, F. M. et al., “Current Protocols in Molecular Biology”, John Wiley & Sons, (1998), the entire teachings of which are incorporated by reference herein). The exact conditions which determine the stringency of hybridization depend not only on ionic strength (e.g., 0.2×SSC, 0.1×SSC), temperature (e.g., room temperature, 42° C., 68° C.) and the concentration of destabilizing agents such as formamide or denaturing agents such as SDS, but also on factors such as the length of the nucleic acid sequence, base composition, percent mismatch between hybridizing sequences and the frequency of occurrence of subsets of that sequence within other non-identical sequences. Thus, equivalent conditions can be determined by varying one or more of these parameters while maintaining a similar degree of identity or similarity between the two nucleic acid molecules. Typically, conditions are used such that sequences at least about 60%, at least about 70%, at least about 80%, at least about 90% or at least about 95% or more identical to each other remain hybridized to one another. By varying hybridization conditions from a level of stringency at which no hybridization occurs to a level at which hybridization is first observed, conditions which will allow a given sequence to hybridize (e.g., selectively) with the most similar sequences in the sample can be determined.

[0214] Exemplary conditions are described in Krause, M. H. and S. A. Aaronson, Methods in Enzymology 200: 546-556 (1991), and in, Ausubel, et al., “Current Protocols in Molecular Biology”, John Wiley & Sons, (1998), which describes the determination of washing conditions for moderate or low stringency conditions. Washing is the step in which conditions are usually set so as to determine a minimum level of complementarity of the hybrids. Generally, starting from the lowest temperature at which only homologous hybridization occurs, each ° C. by which the final wash temperature is reduced (holding SSC concentration constant) allows an increase by 1% in the maximum extent of mismatching among the sequences that hybridize. Generally, doubling the concentration of SSC results in an increase in Tₘ of −17° C. Using these guidelines, the washing temperature can be determined empirically for high, moderate or low stringency, depending on the level of mismatch sought.

[0215] For example, a low stringency wash can comprise washing in a solution containing 0.2×SSC/0.1% SDS for 10 minutes at room temperature; a moderate stringency wash can comprise washing in a prewarmed solution (42° C.) solution containing 0.2×SSC/0.1% SDS for 15 minutes at 42° C.; and a high stringency wash can comprise washing in prewarmed (68° C.) solution containing 0.1×SSC/0.1% SDS for 15 minutes at 68° C. Furthermore, washes can be performed repeatedly or sequentially to obtain a desired result as known in the art. Equivalent conditions can be determined by varying one or more of the parameters given as an example, as known in the art, while maintaining a similar degree of identity or similarity between the target nucleic acid molecule and the primer or probe used.

[0216] The percent homology or identity of two nucleotide or amino acid sequences can be determined by aligning the sequences for optimal comparison purposes (e.g., gaps can be introduced in the sequence of a first sequence for optimal alignment). The nucleotides or amino acids at corresponding positions are then compared, and the percent identity between the two sequences is a function of the number of identical positions shared by the sequences (i.e., % identity=# of identical positions/total # of positions×100). When a position in one sequence is occupied by the same nucleotide or amino acid residue as the corresponding position in the other sequence, then the molecules are homologous at that position. As used herein, nucleic acid or amino acid “homology” is equivalent to nucleic acid or amino acid “identity”. In certain embodiments, the length of a sequence aligned for comparison purposes is at least 30%, for example, at least 40%, in certain embodiments at least 60%, and in other embodiments at least 70%, 80%, 90% or 95% of the length of the reference sequence. The actual comparison of the two sequences can be accomplished by well-known methods, for example, using a mathematical algorithm. A preferred, non-limiting example of such a mathematical algorithm is described in Karlin et al., Proc. Natl. Acad. Sci. USA 90:5873-5877 (1993). Such an algorithm is incorporated into the NBLAST and XBLAST programs (version 2.0) as described in Altschul et al., Nucleic Acids Res. 25:389-3402 (1997). When utilizing BLAST and Gapped BLAST programs, the default parameters of the respective programs (e.g., NBLAST) can be used. In one embodiment, parameters for sequence comparison can be set at score=100, wordlength=12, or can be varied (e.g., W=5 or W=20).

[0217] Another preferred, non-limiting example of a mathematical algorithm utilized for the comparison of sequences is the algorithm of Myers and Miller, CABIOS 4(1): 11-17 (1988). Such an algorithm is incorporated into the ALIGN program (version 2.0) which is part of the GCG sequence alignment software package (Accelrys, Cambridge, UK). When utilizing the ALIGN program for comparing amino acid sequences, a PAM120 weight residue table, a gap length penalty of 12, and a gap penalty of 4 can be used. Additional algorithms for sequence analysis are known in the art and include ADVANCE and ADAM as described in Torellis and Robotti, Comput. Appl. Biosci. 10:3-5 (1994); and FASTA described in Pearson and Lipman, Proc. Natl. Acad. Sci. USA 85:2444-8 (1988).

[0218] In another embodiment, the percent identity between two amino acid sequences can be accomplished using the GAP program in the GCG software package using either a BLOSUM63 matrix or a PAM250 matrix, and a gap weight of 12, 10, 8, 6, or 4 and a length weight of 2, 3, or 4. In yet another embodiment, the percent identity between two nucleic acid sequences can be accomplished using the GAP program in the GCG software package using a gap weight of 50 and a length weight of 3.

[0219] The present invention also provides isolated nucleic acid molecules that contain a fragment or portion that hybridizes under highly stringent conditions to a nucleic acid sequence comprising SEQ ID NO: 1 or 3 or the complement of SEQ ID NO: 1 or 3, and also provides isolated nucleic acid molecules that contain a fragment or portion that hybridizes under highly stringent conditions to a nucleic acid sequence encoding an amino acid sequence of the invention or polymorphic variant thereof. The nucleic acid fragments of the invention are at least about 15, for example, at least about 18, 20, 23 or 25 nucleotides, and can be 30, 40, 50, 100, 200 or more nucleotides in length. Longer fragments, for example, 30 or more nucleotides in length, encoding antigenic polypeptides described herein are particularly useful, such as for the generation of antibodies as described below.

[0220] Probes and Primers

[0221] In a related aspect, the nucleic acid fragments of the invention are used as probes or primers in assays such as those described herein. “Probes” or “primers” are oligonucleotides that hybridize in a base-specific manner to a complementary strand of nucleic acid molecules. Such probes and primers include polypeptide nucleic acids, as described in Nielsen et al., (Science 254:1497-1500 (1991)).

[0222] A probe or primer comprises a region of nucleic acid that hybridizes to at least about 15, for example about 20-25, and in certain embodiments about 40, 50 or 75, consecutive nucleotides of a nucleic acid of the invention, such as a nucleic acid comprising a contiguous nucleic acid sequence of SEQ ID NOs: 1 or 3 or the complement of SEQ ID Nos: 1 or 3, or a nucleic acid sequence encoding an amino acid sequence of SEQ ID NO: 2 or polymorphic variant thereof. In preferred embodiments, a probe or primer comprises 100 or fewer nucleotides, in certain embodiments, from 6 to 50 nucleotides, for example, from 12 to 30 nucleotides. In other embodiments, the probe or primer is at least 70% identical to the contiguous nucleic acid sequence or to the complement of the contiguous nucleotide sequence, for example, at least 80% identical, in certain embodiments at least 90% identical, and in other embodiments at least 95% identical, or even capable of selectively hybridizing to the contiguous nucleic acid sequence or to the complement of the contiguous nucleotide sequence. Often, the probe or primer further comprises a label, e.g., radioisotope, fluorescent compound, enzyme, or enzyme co-factor.

[0223] Particularly useful probes and primers of the invention are those which hybridize to marker locations (e.g. in the FLAP gene) and those that permit amplication (e.g. using PCR) of a small DNA fragment that include a marker of interest, especially markers that form haplotypes of the invention, Kits containing one or two or three or more of such probes and primers are contemplated as aspects of the invention.

[0224] The nucleic acid molecules of the invention such as those described above can be identified and isolated using standard molecular biology techniques and the sequence information provided herein. For example, nucleic acid molecules can be amplified and isolated using the polymerase chain reaction and synthetic oligonucleotide primers based on one or more of SEQ ID NOs: 1 or 3, or the complement thereof, or designed based on nucleotides based on sequences encoding one or more of the amino acid sequences provided herein. See generally PCR Technology: Principles and Applications for DNA Amplification (ed. H. A. Erlich, Freeman Press, NY, N.Y., 1992); PCR Protocols: A Guide to Methods and Applications (Eds. Innis et al., Academic Press, San Diego, Calif., 1990); Mattila et al., Nucl. Acids Res. 19:4967 (1991); Eckert et al., PCR Methods and Applications 1:17 (1991); PCR (eds. McPherson et al., IRL Press, Oxford); and U.S. Pat. No. 4,683,202. The nucleic acid molecules can be amplified using cDNA, mRNA or genomic DNA as a template, cloned into an appropriate vector and characterized by DNA sequence analysis.

[0225] Other suitable amplification methods include the ligase chain reaction (LCR) (see Wu and Wallace, Genomics 4:560 (1989), Landegren et al., Science 241:1077 (1988), transcription amplification (Kwoh et al., Proc. Natl. Acad. Sci. USA 86:1173 (1989)), and self-sustained sequence replication (Guatelli et al., Proc. Nat. Acad. Sci. USA 87:1874 (1990)) and nucleic acid based sequence amplification (NASBA). The latter two amplification methods involve isothermal reactions based on isothermal transcription, which produce both single stranded RNA (ssRNA) and double stranded DNA (dsDNA) as the amplification products in a ratio of about 30 or 100 to 1, respectively.

[0226] The amplified DNA can be labeled, for example, radiolabeled, and used as a probe for screening a cDNA library derived from human cells, mRNA in zap express, ZIPLOX or other suitable vector. Corresponding clones can be isolated, DNA can obtained following in vivo excision, and the cloned insert can be sequenced in either or both orientations by art recognized methods to identify the correct reading frame encoding a polypeptide of the appropriate molecular weight. For example, the direct analysis of the nucleic acid molecules of the present invention can be accomplished using well-known methods that are commercially available. See, for example, Sambrook et al., Molecular Cloning, A Laboratory Manual (2nd Ed., CSHP, New York 1989); Zyskind et al., Recombinant DNA Laboratory Manual, (Acad. Press, 1988)). Using these or similar methods, the polypeptide and the DNA encoding the polypeptide can be isolated, sequenced and further characterized.

[0227] Antisense nucleic acid molecules of the invention can be designed using the nucleotide sequences of SEQ ID NOs: 1 or 3 and/or the complement of one or more of SEQ ID NOs: 1 or 3 and/or a portion of one or more of SEQ ID NOs: 1 or 3 or the complement of one or more of SEQ ID NOs: 1 or 3 and/or a sequence encoding the amino acid sequences of SEQ ID NOs: 2 or encoding a portion of one or more of SEQ ID NOs: 1 or 3 or their complement. They can be constructed using chemical synthesis and enzymatic ligation reactions using procedures known in the art. For example, an antisense nucleic acid molecule (e.g., an antisense oligonucleotide) can be chemically synthesized using naturally occurring nucleotides or variously modified nucleotides designed to increase the biological stability of the molecules or to increase the physical stability of the duplex formed between the antisense and sense nucleic acids, e.g., phosphorothioate derivatives and acridine substituted nucleotides can be used. Alternatively, the antisense nucleic acid molecule can be produced biologically using an expression vector into which a nucleic acid molecule has been subcloned in an antisense orientation (i.e., RNA transcribed from the inserted nucleic acid molecule will be of an antisense orientation to a target nucleic acid of interest).

[0228] The nucleic acid sequences can also be used to compare with endogenous DNA sequences in patients to identify one or more of the disorders related to FLAP, and as probes, such as to hybridize and discover related DNA sequences or to subtract out known sequences from a sample. The nucleic acid sequences can further be used to derive primers for genetic fingerprinting, to raise anti-polypeptide antibodies using DNA immunization techniques, and as an antigen to raise anti-DNA antibodies or elicit immune responses. Portions or fragments of the nucleotide sequences identified herein (and the corresponding complete gene sequences) can be used in numerous ways as polynucleotide reagents. For example, these sequences can be used to: (i) map their respective genes on a chromosome; and, thus, locate gene regions or nucleic acid regions associated with genetic disease; (ii) identify an individual from a minute biological sample (tissue typing); and (iii) aid in forensic identification of a biological sample. Additionally, the nucleotide sequences of the invention can be used to identify and express recombinant polypeptides for analysis, characterization or therapeutic use, or as markers for tissues in which the corresponding polypeptide is expressed, either constitutively, during tissue differentiation, or in diseased states. The nucleic acid sequences can additionally be used as reagents in the screening and/or diagnostic assays described herein, and can also be included as components of kits (e.g., reagent kits) for use in the screening and/or diagnostic assays described herein.

[0229] Vectors

[0230] Another aspect of the invention pertains to nucleic acid constructs containing a nucleic acid molecule of SEQ ID NOs: 1, 3, 718 or 719 or the complement thereof (or a portion thereof). Yet another aspect of the invention pertains to nucleic acid constructs containing a nucleic acid molecule encoding an amino acid of SEQ ID NO: 2, SEQ ID NO: 720 or polymorphic variant thereof. The constructs comprise a vector (e.g., an expression vector) into which a sequence of the invention has been inserted in a sense or antisense orientation. As used herein, the term “vector” refers to a nucleic acid molecule capable of transporting another nucleic acid to which it has been linked. One type of vector is a “plasmid”, which refers to a circular double stranded DNA loop into which additional DNA segments can be ligated. Another type of vector is a viral vector, wherein additional DNA segments can be ligated into the viral genome. Certain vectors are capable of autonomous replication in a host cell into which they are introduced (e.g., bacterial vectors having a bacterial origin of replication and episomal mammalian vectors). Other vectors (e.g., non-episomal mammalian vectors) are integrated into the genome of a host cell upon introduction into the host cell, and thereby are replicated along with the host genome. Moreover, certain vectors, such as expression vectors, are capable of directing the expression of genes or nucleic acids to which they are operably linked. In general, expression vectors of utility in recombinant DNA techniques are often in the form of plasmids. However, the invention is intended to include such other forms of expression vectors, such as viral vectors (e.g., replication defective retroviruses, adenoviruses and adeno-associated viruses) that serve equivalent functions.

[0231] Preferred recombinant expression vectors of the invention comprise a nucleic acid molecule of the invention in a form suitable for expression of the nucleic acid molecule in a host cell. This means that the recombinant expression vectors include one or more regulatory sequences, selected on the basis of the host cells to be used for expression, which is operably linked to the nucleic acid sequence to be expressed. Within a recombinant expression vector, “operably linked” or “operatively linked” is intended to mean that the nucleic acid sequence of interest is linked to the regulatory sequence(s) in a manner which allows for expression of the nucleic acid sequence (e.g., in an in vitro transcription/translation system or in a host cell when the vector is introduced into the host cell). The term “regulatory sequence” is intended to include promoters, enhancers and other expression control elements (e.g., polyadenylation signals). Such regulatory sequences are described, for example, in Goeddel, “Gene Expression Technology”, Methods in Enzymology 185, Academic Press, San Diego, Calif. (1990). Regulatory sequences include those which direct constitutive expression of a nucleic acid sequence in many types of host cell and those which direct expression of the nucleic acid sequence only in certain host cells (e.g., tissue-specific regulatory sequences). It will be appreciated by those skilled in the art that the design of the expression vector can depend on such factors as the choice of the host cell to be transformed and the level of expression of polypeptide desired. The expression vectors of the invention can be introduced into host cells to thereby produce polypeptides, including fusion polypeptides, encoded by nucleic acid molecules as described herein.

[0232] The recombinant expression vectors of the invention can be designed for expression of a polypeptide of the invention in prokaryotic or eukaryotic cells, e.g., bacterial cells such as E. coli, insect cells (using baculovirus expression vectors), yeast cells or mammalian cells. Suitable host cells are discussed further in Goeddel, supra. Alternatively, the recombinant expression vector can be transcribed and translated in vitro, for example using T7 promoter regulatory sequences and T7 polymerase.

[0233] Another aspect of the invention pertains to host cells into which a recombinant expression vector of the invention has been introduced. The terms “host cell” and “recombinant host cell” are used interchangeably herein. It is understood that such terms refer not only to the particular subject cell but also to the progeny or potential progeny of such a cell. Because certain modifications may occur in succeeding generations due to either mutation or enviromnental influences, such progeny may not, in fact, be identical to the parent cell, but are still included within the scope of the term as used herein.

[0234] A host cell can be any prokaryotic or eukaryotic cell. For example, a nucleic acid molecule of the invention can be expressed in bacterial cells (e.g., E. coli), insect cells, yeast or mammalian cells (such as Chinese hamster ovary cells (CHO) or COS cells). Other suitable host cells are known to those skilled in the art.

[0235] Vector DNA can be introduced into prokaryotic or eukaryotic cells via conventional transformation or transfection techniques. As used herein, the terms “transformation” and “transfection” are intended to refer to a variety of art-recognized techniques for introducing a foreign nucleic acid molecule (e.g., DNA) into a host cell, including calcium phosphate or calcium chloride co-precipitation, DEAE-dextran-mediated transfection, lipofection, or electroporation. Suitable methods for transforming or transfecting host cells can be found in Sambrook, et al. (supra), and other laboratory manuals.

[0236] For stable transfection of mammalian cells, it is known that, depending upon the expression vector and transfection technique used, only a small fraction of cells may integrate the foreign DNA into their genome. In order to identify and select these integrants, a gene or nucleic acid that encodes a selectable marker (e.g., for resistance to antibiotics) is generally introduced into the host cells along with the gene or nucleic acid of interest. Preferred selectable markers include those that confer resistance to drugs, such as G418, hygromycin and methotrexate. Nucleic acid molecules encoding a selectable marker can be introduced into a host cell on the same vector as the nucleic acid molecule of the invention or can be introduced on a separate vector. Cells stably transfected with the introduced nucleic acid molecule can be identified by drug selection (e.g., cells that have incorporated the selectable marker gene or nucleic acid will survive, while the other cells die).

[0237] A host cell of the invention, such as a prokaryotic host cell or eukaryotic host cell in culture can be used to produce (i.e., express) a polypeptide of the invention. Accordingly, the invention further provides methods for producing a polypeptide using the host cells of the invention. In one embodiment, the method comprises culturing the host cell of invention (into which a recombinant expression vector encoding a polypeptide of the invention has been introduced) in a suitable medium such that the polypeptide is produced. In another embodiment, the method further comprises isolating the polypeptide from the medium or the host cell.

[0238] The host cells of the invention can also be used to produce nonhuman transgenic animals. For example, in one embodiment, a host cell of the invention is a fertilized oocyte or an embryonic stem cell into which a nucleic acid molecule of the invention has been introduced (e.g., an exogenous FLAP nucleic acid, or an exogenous nucleic acid encoding a FLAP polypeptide). Such host cells can then be used to create non-human transgenic animals in which exogenous nucleotide sequences have been introduced into the genome or homologous recombinant animals in which endogenous nucleotide sequences have been altered. Such animals are useful for studying the function and/or activity of the nucleic acid sequence and polypeptide encoded by the sequence and for identifying and/or evaluating modulators of their activity. As used herein, a “transgenic animal” is a non-human animal, preferably a mammal, more preferably a rodent such as a rat or mouse, in which one or more of the cells of the animal include a transgene. Other examples of transgenic animals include non-human primates, sheep, dogs, cows, goats, chickens and amphibians. A transgene is exogenous DNA which is integrated into the genome of a cell from which a transgenic animal develops and which remains in the genome of the mature animal, thereby directing the expression of an encoded gene product in one or more cell types or tissues of the transgenic animal. As used herein, a “homologous recombinant animal” is a non-human animal, preferably a mammal, more preferably a mouse, in which an endogenous gene has been altered by homologous recombination between the endogenous gene and an exogenous DNA molecule introduced into a cell of the animal, e.g., an embryonic cell of the animal, prior to development of the animal.

[0239] Methods for generating transgenic animals via embryo manipulation and microinjection, particularly animals such as mice, have become conventional in the art and are described, for example, in U.S. Pat. Nos. 4,736,866 and 4,870,009, U.S. Pat. No. 4,873,191 and in Hogan, Manipulating the Mouse Embryo (Cold Spring Harbor Laboratory Press, Cold Spring Harbor, N.Y., 1986). Methods for constructing homologous recombination vectors and homologous recombinant animals are described further in Bradley, Current Opinion in BioTechnology 2:823-829 (1991) and in PCT Publication Nos. WO 90/11354, WO 91/01140, WO 92/0968, and WO 93/04169. Clones of the non-human transgenic animals described herein can also be produced according to the methods described in Wilmut et al., Nature 385:810-813 (1997) and PCT Publication Nos. WO 97/07668 and WO 97/07669.

### Polypeptides of the Invention

[0240] The present invention pertains to isolated polypeptides encoded by FLAP nucleic acids (“FLAP polypeptides”), and fragments and variants thereof, as well as polypeptides encoded by nucleotide sequences described herein (e.g., other splicing variants). The present invention also pertains to isolated polypeptides encoded by LTA4H nucleic acids (“LTA4H polypeptides”), and fragments and variants thereof, as well as polypeptides encoded by nucleotide sequences described herein (e.g., other splicing variants) The term “polypeptide” refers to a polymer of amino acids, and not to a specific length; thus, peptides, oligopeptides and proteins are included within the definition of a polypeptide. As used herein, a polypeptide is said to be “isolated” or “purified” when it is substantially free of cellular material when it is isolated from recombinant and non-recombinant cells, or free of chemical precursors or other chemicals when it is chemically synthesized. A polypeptide, however, can be joined to another polypeptide with which it is not normally associated in a cell (e.g., in a “fusion protein”) and still be “isolated” or “purified.” A detailed discussion of the methods to make a polypeptide of the invention is provided in International Application No. PCT/US03/32556, filed on Oct. 16, 2003, which is incorporated by reference herein in its entirety.

### Antibodies of the Invention

[0241] Polyclonal and/or monoclonal antibodies that specifically bind one form of the polypeptide or nucleic acid product (e.g., a polypeptide encoded by a nucleic acid having a SNP as set forth in Table 13), but not to another form of the polypeptide or nucleic acid product, are also provided. Antibodies are also provided which bind a portion of either polypeptide encoded by nucleic acids of the invention (e.g., SEQ ID NO: 1 or SEQ ID NO: 3 or SEQ ID NO: 718 or SEQ ID NO: 719, or the complement thereof), or to a polypeptide encoded by nucleic acids of the invention that contain a polymorphic site or sites. The invention also provides antibodies to the polypeptides and polypeptide fragments of the invention, or a portion thereof, or having an amino acid sequence encoded by a nucleic acid molecule comprising all or a portion of SEQ ID NOs: 1, 3, 718 or 719, or the complement thereof, or another variant or portion thereof. A detailed discussion of the methods to make the antibodies of the invention is provided in International Application No. PCT/US03/32556, filed on Oct. 16, 2003, which is incorporated by reference herein in its entirety.

### Diagnostic Assays

[0242] The nucleic acids, probes, primers, polypeptides and antibodies described herein can be used in methods of diagnosis of a susceptibility to MI, ACS, stroke or PAOD, or to another disease or condition associated with an MI gene, such as FLAP or LTA4H, as well as in kits useful for diagnosis of a susceptibility to MI, ACS, stroke or PAOD, or to another disease or condition associated with FLAP or LTA4H. In one embodiment, the kit useful for diagnosis of susceptibility to MI, ACS, stroke or PAOD, or to another disease or condition associated with FLAP or LTA4H comprises primers as described herein, wherein the primers contain one or more of the SNPs identified in Table 13 or Table 37.

[0243] In one embodiment of the invention, diagnosis of susceptibility to MI, ACS, stroke or PAOD (or diagnosis of susceptibility to another disease or condition associated with FLAP or LTA4H), is made by detecting a polymorphism in a FLAP or LTA4H nucleic acid as described herein. The polymorphism can be an alteration in a FLAP or LTA4H nucleic acid, such as the insertion or deletion of a single nucleotide, or of more than one nucleotide, resulting in a frame shift alteration; the change of at least one nucleotide, resulting in a change in the encoded amino acid; the change of at least one nucleotide, resulting in the generation of a premature stop codon; the deletion of several nucleotides, resulting in a deletion of one or more amino acids encoded by the nucleotides; the insertion of one or several nucleotides, such as by unequal recombination or gene conversion, resulting in an interruption of the coding sequence of the gene or nucleic acid; duplication of all or a part of the gene or nucleic acid; transposition of all or a part of the gene or nucleic acid; or rearrangement of all or a part of the gene or nucleic acid. More than one such alteration may be present in a single gene or nucleic acid. Such sequence changes cause an alteration in the polypeptide encoded by a FLAP or LTA4H nucleic acid. For example, if the alteration is a frame shift alteration, the frame shift can result in a change in the encoded amino acids, and/or can result in the generation of a premature stop codon, causing generation of a truncated polypeptide. Alternatively, a polymorphism associated with a disease or condition associated with a FLAP or LTA4H nucleic acid or a susceptibility to a disease or condition associated with a FLAP or LTA4H nucleic acid can be a synonymous alteration in one or more nucleotides (i.e., an alteration that does not result in a change in the polypeptide encoded by a FLAP nucleic acid or LTA4H nucleic acid). Such a polymorphism may alter splicing sites, affect the stability or transport of mRNA, or otherwise affect the transcription or translation of the nucleic acid. A FLAP nucleic acid or a LTA4H nucleic acid that has any of the alteration described above is referred to herein as an “altered nucleic acid.”

[0244] In a first method of diagnosing a susceptibility to MI, ACS, stroke or PAOD, hybridization methods, such as Southern analysis, Northern analysis, or in situ hybridizations, can be used (see Current Protocols in Molecular Biology, Ausubel, F. et al., eds., John Wiley & Sons, including all supplements through 1999). For example, a biological sample from a test subject (a “test sample”) of genomic DNA, RNA, or cDNA, is obtained from an individual suspected of having, being susceptible to or predisposed for, or carrying a defect for, a susceptibility to a disease or condition associated with a FLAP nucleic acid or a disease or condition associated with a LTA4H nucleic acid (the “test individual”). The individual can be an adult, child, or fetus. The test sample can be from any source which contains genomic DNA, such as a blood sample, sample of amniotic fluid, sample of cerebrospinal fluid, or tissue sample from skin, muscle, buccal or conjunctival mucosa, placenta, gastrointestinal tract or other organs. A test sample of DNA from fetal cells or tissue can be obtained by appropriate methods, such as by amniocentesis or chorionic villus sampling. The DNA, RNA, or cDNA sample is then examined to determine whether a polymorphism in an MI nucleic acid is present, and/or to determine which splicing variant(s) encoded by the FLAP or LTA4H is present. The presence of the polymorphism or splicing variant(s) can be indicated by hybridization of the nucleic acid in the genomic DNA, RNA, or cDNA to a nucleic acid probe. A “nucleic acid probe,” as used herein, can be a DNA probe or an RNA probe; the nucleic acid probe can contain at least one polymorphism in a FLAP nucleic acid, LTA4H nucleic acid or contains a nucleic acid encoding a particular splicing variant of a FLAP nucleic acid or a particular splicing variant of a LTA4H nucleic acid. The probe can be any of the nucleic acid molecules described above (e.g., the nucleic acid, a fragment, a vector comprising the nucleic acid, a probe or primer, etc.).

[0245] To diagnose a susceptibility to MI, ACS, stroke or PAOD (or another disease or condition associated with FLAP), the test sample containing a FLAP nucleic acid is contacted with at least one nucleic acid probe to form a hybridization sample. A preferred probe for detecting mRNA or genomic DNA is a labeled nucleic acid probe capable of hybridizing to mRNA or genomic DNA sequences described herein. The nucleic acid probe can be, for example, a full-length nucleic acid molecule, or a portion thereof, such as an oligonucleotide of at least 15, 30, 50, 100, 250 or 500 nucleotides in length and sufficient to specifically hybridize under stringent conditions to appropriate mRNA or genomic DNA. For example, the nucleic acid probe can be all or a portion of one of SEQ ID NOs: 1, 3, 718 or 719 or the complement thereof or a portion thereof; or can be a nucleic acid encoding all or a portion of one of SEQ ID NO: 2 or 720. Other suitable probes for use in the diagnostic assays of the invention are described above (see e.g., probes and primers discussed under the heading, “Nucleic Acids of the Invention”).

[0246] The hybridization sample is maintained under conditions that are sufficient to allow specific hybridization of the nucleic acid probe to a FLAP nucleic acid or a LTA4H nucleic acid. “Specific hybridization,” as used herein, indicates exact hybridization (e.g., with no mismatches). Specific hybridization can be performed under high stringency conditions or moderate stringency conditions, for example, as described above. In a particularly preferred embodiment, the hybridization conditions for specific hybridization are high stringency.

[0247] Specific hybridization, if present, is then detected using standard methods. If specific hybridization occurs between the nucleic acid probe and FLAP nucleic acid in the test sample, then the FLAP has the polymorphism, or is the splicing variant, that is present in the nucleic acid probe. More than one nucleic acid probe can also be used concurrently in this method. Specific hybridization of any one of the nucleic acid probes is indicative of a polymorphism in the FLAP nucleic acid, or of the presence of a particular splicing variant encoding the FLAP nucleic acid, and is therefore diagnostic for a susceptibility to a disease or condition associated with FLAP (e.g., MI, ACS, stroke or PAOD).

[0248] In addition, if specific hybridization occurs between the nucleic acid probe and LTA4H nucleic acid in the test sample, then the LTA4H has the polymorphism, or is the splicing variant, that is present in the nucleic acid probe. More than one nucleic acid probe can also be used concurrently in this method. Specific hybridization of any one of the nucleic acid probes is indicative of a polymorphism in the LTA4H nucleic acid, or of the presence of a particular splicing variant encoding the LTA4H nucleic acid, and is therefore diagnostic for a susceptibility to a disease or condition associated with LTA4H (e.g., MI, ACS, stroke or PAOD).

[0249] In Northern analysis (see Current Protocols in Molecular Biology, Ausubel, F. et al., eds., John Wiley & Sons, supra) the hybridization methods described above are used to identify the presence of a polymorphism or a particular splicing variant, associated with a susceptibility to a disease or condition associated with FLAP or LTA4H (e.g., MI, ACS, stroke or PAOD). For Northern analysis, a test sample of RNA is obtained from the individual by appropriate means. Specific hybridization of a nucleic acid probe, as described above, to RNA from the individual is indicative of a polymorphism in a FLAP nucleic acid, or of the presence of a particular splicing variant encoded by a FLAP nucleic acid, a polymorphism in a LTA4H nucleic acid, or of the presence of a particular splicing variant encoded by a LTA4H nucleic acid and is therefore diagnostic for susceptibility to a disease or condition associated with FLAP or LTA4H (e.g., MI, ACS, stroke or PAOD).

[0250] For representative examples of use of nucleic acid probes, see, for example, U.S. Pat. Nos. 5,288,611 and 4,851,330.

[0251] Alternatively, a peptide nucleic acid (PNA) probe can be used instead of a nucleic acid probe in the hybridization methods described above. PNA is a DNA mimic having a peptide-like, inorganic backbone, such as N-(2-aminoethyl)glycine units, with an organic base (A, G, C, T or U) attached to the glycine nitrogen via a methylene carbonyl linker (see, for example, Nielsen, P. E. et al., Bioconjugate Chemistry 5, American Chemical Society, p. 1 (1994). The PNA probe can be designed to specifically hybridize to a nucleic acid having a polymorphism associated with a susceptibility to a disease or condition associated with FLAP (e.g., MI). Hybridization of the PNA probe to a FLAP nucleic acid as described herein is diagnostic for the susceptibility to the disease or condition.

[0252] In another method of the invention, mutation analysis by restriction digestion can be used to detect an altered nucleic acid, or nucleic acids containing a polymorphism(s), if the mutation or polymorphism in the nucleic acid results in the creation or elimination of a restriction site. A test sample containing genomic DNA is obtained from the individual. Polymerase chain reaction (PCR) can be used to amplify a FLAP nucleic acid or a LTA4H nucleic acid (and, if necessary, the flanking sequences) in the test sample of genomic DNA from the test individual. RFLP analysis is conducted as described (see Current Protocols in Molecular Biology, supra). The digestion pattern of the relevant DNA fragment indicates the presence or absence of the alteration or polymorphism in the FLAP nucleic acid or LTA4H nucleic acid, and therefore indicates the presence or absence of the susceptibility to a disease or condition associated with FLAP or LTA4H (e.g., MI, ACS, stroke or PAOD).

[0253] Sequence analysis can also be used to detect specific polymorphisms in the FLAP nucleic acid. A test sample of DNA or RNA is obtained from the test individual. PCR or other appropriate methods can be used to amplify the nucleic acid, and/or its flanking sequences, if desired. The sequence of a FLAP nucleic acid, or a fragment of the nucleic acid, or cDNA, or fragment of the cDNA, or mRNA, or fragment of the mRNA, is determined, using standard methods. The sequence of the nucleic acid, nucleic acid fragment, cDNA, cDNA fragment, mRNA, or mRNA fragment is compared with the known nucleic acid sequence of the nucleic acid, cDNA (e.g., one or more of SEQ ID NOs: 1, 3, 718 or 719and/or the complement of SEQ ID NO: 1, 3, 718 or 719), or a nucleic acid sequence encoding SEQ ID NO: 2, SEQ ID NO: 720 or a fragment thereof) or mRNA, as appropriate. The presence of a polymorphism in the FLAP or LTA4H indicates that the individual has a susceptibility to a disease associated with FLAP or LTA4H (e.g., MI, ACS, stroke or PAOD).

[0254] Allele-specific oligonucleotides can also be used to detect the presence of polymorphism(s) in the FLAP nucleic acid or the LTA4H nucleic acid, through the use of dot-blot hybridization of amplified oligonucleotides with allele-specific oligonucleotide (ASO) probes (see, for example, Saiki, R. et al., Nature 324:163-166 (1986)). An “allele-specific oligonucleotide” (also referred to herein as an “allele-specific oligonucleotide probe”) is an oligonucleotide of approximately 10-50 base pairs, for example, approximately 15-30 base pairs, that specifically hybridizes to a FLAP nucleic acid, and that contains a polymorphism associated with a susceptibility to a disease or condition associated with FLAP or LTA4H (e.g., MI, ACS, stroke or PAOD). An allele-specific oligonucleotide probe that is specific for particular polymorphisms in a FLAP or LTA4H nucleic acid can be prepared, using standard methods (see Current Protocols in Molecular Biology, supra). To identify polymorphisms in the nucleic acid associated with susceptibility to disease, a test sample of DNA is obtained from the individual. PCR can be used to amplify all or a fragment of a FLAP nucleic acid or LTA4H nucleic acid, and their flanking sequences. The DNA containing the amplified FLAP or LTA4H nucleic acid (or fragment of the nucleic acid) is dot-blotted, using standard methods (see Current Protocols in Molecular Biology, supra), and the blot is contacted with the oligonucleotide probe. The presence of specific hybridization of the probe to the amplified FLAP or LTA4H is then detected. Specific hybridization of an allele-specific oligonucleotide probe to DNA from the individual is indicative of a polymorphism in the FLAP or a polymorphism in the LTA4H and is therefore indicative of a susceptibility to a disease or condition associated with FLAP or LTA4H respectively (e.g., MI, ACS, stroke or PAOD).

[0255] An allele-specific primer hybridizes to a site on target DNA overlapping a polymorphism and only primes amplification of an allelic form to which the primer exhibits perfect complementarity. See Gibbs, Nucleic Acid Res. 17, 2427-2448 (1989). This primer is used in conjunction with a second primer which hybridizes at a distal site. Amplification proceeds from the two primers, resulting in a detectable product which indicates the particular allelic form is present. A control is usually performed with a second pair of primers, one of which shows a single base mismatch at the polymorphic site and the other of which exhibits perfect complementarity to a distal site. The single-base mismatch prevents amplification and no detectable product is formed. The method works best when the mismatch is included in the 3′-most position of the oligonucleotide aligned with the polymorphism because this position is most destabilizing to elongation from the primer (see, e.g., WO 93/22456).

[0256] With the addition of such analogs as locked nucleic acids (LNAs), the size of primers and probes can be reduced to as few as 8 bases. LNAs are a novel class of bicyclic DNA analogs in which the 2′ and 4′ positions in the furanose ring are joined via an O-methylene (oxy-LNA), S-methylene (thio-LNA), or amino methylene (amino-LNA) moiety. Common to all of these LNA variants is an affinity toward complementary nucleic acids, which is by far the highest reported for a DNA analog. For example, particular all oxy-LNA nonamers have been shown to have melting temperatures of 64° C. and 74° C. when in complex with complementary DNA or RNA, respectively, as oposed to 28° C. for both DNA and RNA for the corresponding DNA nonamer. Substantial increases in Tₘ are also obtained when LNA monomers are used in combination with standard DNA or RNA monomers. For primers and probes, depending on where the LNA monomers are included (e.g., the 3′ end, the 5′end, or in the middle), the Tₘ could be increased considerably.

[0257] In another embodiment, arrays of oligonucleotide probes that are complementary to target nucleic acid sequence segments from an individual, can be used to identify polymorphisms in a FLAP nucleic acid or a LTA4H nucleic acid For example, in one embodiment, an oligonucleotide array can be used. Oligonucleotide arrays typically comprise a plurality of different oligonucleotide probes that are coupled to a surface of a substrate in different known locations. These oligonucleotide arrays, also described as “Genechips™,” have been generally described in the art, for example, U.S. Pat. No. 5,143,854 and PCT patent publication Nos. WO 90/15070 and WO 92/10092. These arrays can generally be produced using mechanical synthesis methods or light directed synthesis methods that incorporate a combination of photolithographic methods and solid phase oligonucleotide synthesis methods. See Fodor et al., Science 251:767-777 (1991); Pirrung et al., U.S. Pat. No. 5,143,854; (see also PCT Application WO 90/15070); Fodor et al., PCT Publication WO 92/10092; and U.S. Pat. No. 5,424,186, the entire teachings of each of which are incorporated by reference herein. Techniques for the synthesis of these arrays using mechanical synthesis methods are described in, e.g., U.S. Pat. No. 5,384,261, the entire teachings of which are incorporated by reference herein. In another example, linear arrays can be utilized.

[0258] Once an oligonucleotide array is prepared, a nucleic acid of interest is hybridized with the array and scanned for polymorphisms. Hybridization and scanning are generally carried out by methods described herein and also in, e.g., published PCT Application Nos. WO 92/10092 and WO 95/11995, and U.S. Pat. No. 5,424,186, the entire teachings of which are incorporated by reference herein. In brief, a target nucleic acid sequence that includes one or more previously identified polymorphic markers is amplified using well-known amplification techniques, e.g., PCR. Typically, this involves the use of primer sequences that are complementary to the two strands of the target sequence both upstream and downstream from the polymorphism. Asymmetric PCR techniques may also be used. Amplified target, generally incorporating a label, is then hybridized with the array under appropriate conditions. Upon completion of hybridization and washing of the array, the array is scanned to determine the position on the array to which the target sequence hybridizes. The hybridization data obtained from the scan is typically in the form of fluorescence intensities as a function of location on the array. In a reverse method, a probe, containing a polymorphism, can be coupled to a solid surface and PCR amplicons are then added to hybridize to these probes.

[0259] Although primarily described in terms of a single detection block, e.g., detection of a single polymorphism arrays can include multiple detection blocks, and thus be capable of analyzing multiple, specific polymorphisms. It will generally be understood that detection blocks may be grouped within a single array or in multiple, separate arrays so that varying, optimal conditions may be used during the hybridization of the target to the array. For example, it may often be desirable to provide for the detection of those polymorphisms that fall within G-C rich stretches of a genomic sequence, separately from those falling in A-T rich segments. This allows for the separate optimization of hybridization conditions for each situation.

[0260] Additional uses of oligonucleotide arrays for detection of polymorphisms can be found, for example, in U.S. Pat. Nos. 5,858,659 and 5,837,832, the entire teachings of which are incorporated by reference herein. Other methods of nucleic acid analysis can be used to detect polymorphisms in a nucleic acid described herein, or variants encoded by a nucleic acid described herein. Representative methods include direct manual sequencing (Church and Gilbert, Proc. Natl. Acad. Sci. USA 81:1991-1995 (1988); Sanger, F. et al., Proc. Natl. Acad. Sci., USA 74:5463-5467 (1977); Beavis et al. U.S. Pat. No. 5,288,644); automated fluorescent sequencing; single-stranded conformation polymorphism assays (SSCP); clamped denaturing gel electrophoresis (CDGE); denaturing gradient gel electrophoresis (DGGE) (Sheffield, V. C. et al., Proc. Natl. Acad. Sci. USA 86:232-236 (1989)), mobility shift analysis (Orita, M. et al., Proc. Natl. Acad. Sci. USA 86:2766-2770 (1989)), restriction enzyme analysis (Flavell et al., Cell 15:25 (1978); Geever, et al., Proc. Natl. Acad. Sci. USA 78:5081 (1981)); heteroduplex analysis; chemical mismatch cleavage (CMC) (Cotton et al., Proc. Natl. Acad. Sci. USA 85:4397-4401 (1985)); RNase protection assays (Myers, R. M. et al., Science 230:1242 (1985)); use of polypeptides which recognize nucleotide mismatches, such as E. coli mutS protein; allele-specific PCR, for example.

[0261] In one embodiment of the invention, diagnosis of a susceptibility to a disease or condition associated with FLAP or LTA4H (e.g., MI, ACS, stroke or PAOD) can also be made by expression analysis by quantitative PCR (kinetic thermal cycling). This technique utilizing TaqMan® can be used to allow the identification of polymorphisms and whether a patient is homozygous or heterozygous. The technique can assess the presence of an alteration in the expression or composition of the polypeptide encoded by a FLAP nucleic acid or splicing variants encoded by a FLAP nucleic acid. The technique can likewise assess the presence of an alteration in the expression or composition of the polypeptide encoded by a LTA4H nucleic acid or splicing variants encoded by a LTA4H nucleic acid. Further, the expression of the variants can be quantified as physically or functionally different.

[0262] In another embodiment of the invention, diagnosis of a susceptibility to MI, ACS, stroke or PAOD (or of another disease or condition associated with FLAP or LTA4H) can also be made by examining expression and/or composition of a FLAP polypeptide, by a variety of methods, including enzyme linked immunosorbent assays (ELISAs), Western blots, immunoprecipitations and immunofluorescence. A test sample from an individual is assessed for the presence of an alteration in the expression and/or an alteration in composition of the polypeptide encoded by a FLAP nucleic acid, or a polypeptide encoded by a LTA4H nucleic acid or for the presence of a particular variant encoded by a FLAP or LTA4H nucleic acid. An alteration in expression of a polypeptide encoded by a FLAP or LTA4H nucleic acid can be, for example, an alteration in the quantitative polypeptide expression (i.e., the amount of polypeptide produced); an alteration in the composition of a polypeptide encoded by a FLAP or LTA4H nucleic acid is an alteration in the qualitative polypeptide expression (e.g., expression of an altered FLAP polypeptide, LTA4H polypeptide or of a different splicing variant). In a preferred embodiment, diagnosis of a susceptibility to a disease or condition associated with FLAP is made by detecting a particular splicing variant encoded by that FLAP variant, or a particular pattern of splicing variants. In another preferred embodiment, diagnosis of a susceptibility to a disease or condition associated with LTA4H is made by detecting a particular splicing variant encoded by that LTA4H variant, or a particular pattern of splicing variants.

[0263] Both such alterations (quantitative and qualitative) can also be present. An “alteration” in the polypeptide expression or composition, refers to an alteration in expression or composition in a test sample, as compared with the expression or composition of polypeptide by a FLAP or LTA4H nucleic acid in a control sample. A control sample is a sample that corresponds to the test sample (e.g., is from the same type of cells), and is from an individual who is not affected by the disease or a susceptibility to a disease or condition associated with a FLAP or LTA4H nucleic acid. An alteration in the expression or composition of the polypeptide in the test sample, as compared with the control sample, is indicative of a susceptibility to a disease or condition associated with FLAP or LTA4H (e.g., MI, ACS, stroke or PAOD). Similarly, the presence of one or more different splicing variants in the test sample, or the presence of significantly different amounts of different splicing variants in the test sample, as compared with the control sample, is indicative of a susceptibility to a disease or condition associated with a FLAP or LTA4H nucleic acid. Various means of examining expression or composition of the polypeptide encoded by a FLAP or LTA4H nucleic acid can be used, including: spectroscopy, colorimetry, electrophoresis, isoelectric focusing and immunoassays (e.g., David et al., U.S. Pat. No. 4,376,110) such as immunoblotting (see also Current Protocols in Molecular Biology, particularly Chapter 10). For example, in one embodiment, an antibody capable of binding to the polypeptide (e.g., as described above), preferably an antibody with a detectable label, can be used. Antibodies can be polyclonal, or more preferably, monoclonal. An intact antibody, or a fragment thereof (e.g., Fab or F(ab′)₂) can be used. The term “labeled”, with regard to the probe or antibody, is intended to encompass direct labeling of the probe or antibody by coupling (i.e., physically linking) a detectable substance to the probe or antibody, as well as indirect labeling of the probe or antibody by reactivity with another reagent that is directly labeled. Examples of indirect labeling include detection of a primary antibody using a fluorescently labeled secondary antibody and end-labeling of a DNA probe with biotin such that it can be detected with fluorescently labeled streptavidin.

[0264] Western blotting analysis, using an antibody as described above that specifically binds to a polypeptide encoded by an altered FLAP (e.g., by a FLAP having a SNP as shown in Table 13) or an antbody that specifically binds to a polypeptide encoded by an altered LTA4H (e.g. by a LTA4H having a SNP as shown in Table 37), or an antibody that specifically binds to a polypeptide encoded by a non-altered nucleic acid, or an antibody that specifically binds to a particular splicing variant encoded by a nucleic acid, can be used to identify the presence in a test sample of a particular splicing variant or of a polypeptide encoded by a polymorphic or altered FLAP or altered LTA4H, or the absence in a test sample of a particular splicing variant or of a polypeptide encoded by a non-polymorphic or non-altered nucleic acid. The presence of a polypeptide encoded by a polymorphic or altered nucleic acid, or the absence of a polypeptide encoded by a non-polymorphic or non-altered nucleic acid, is diagnostic for a susceptibility to a disease or condition associated with FLAP or LTA4H, as is the presence (or absence) of particular splicing variants encoded by the FLAP nucleic acid or the LTA4H nucleic acid.

[0265] In one embodiment of this method, the level or amount of polypeptide encoded by a FLAP nucleic acid in a test sample is compared with the level or amount of the polypeptide encoded by the FLAP in a control sample. A level or amount of the polypeptide in the test sample that is higher or lower than the level or amount of the polypeptide in the control sample, such that the difference is statistically significant, is indicative of an alteration in the expression of the polypeptide encoded by the FLAP, and is diagnostic for a susceptibility to a disease or condition associated with that FLAP. Alternatively, the composition of the polypeptide encoded by a FLAP nucleic acid in a test sample is compared with the composition of the polypeptide encoded by the FLAP in a control sample (e.g., the presence of different splicing variants). A difference in the composition of the polypeptide in the test sample, as compared with the composition of the polypeptide in the control sample, is diagnostic for a susceptibility to a disease or condition associated with that FLAP. In another embodiment, both the level or amount and the composition of the polypeptide can be assessed in the test sample and in the control sample. A difference in the amount or level of the polypeptide in the test sample, compared to the control sample; a difference in composition in the test sample, compared to the control sample; or both a difference in the amount or level, and a difference in the composition, is indicative of a susceptibility to a disease or condition associated with FLAP (e.g., MI).

[0266] The invention further pertains to a method for the diagnosis and identification of susceptibility to myocardial infarction, ACS, stroke or PAOD in an individual, by identifying an at-risk haplotype in FLAP or by identifying an at-risk haplotype in LTA4H. In one embodiment, the at-risk haplotype is one which confers a significant risk of MI, ACS, stroke or PAOD. In one embodiment, significance associated with a haplotype is measured by an odds ratio. In a further embodiment, the significance is measured by a percentage. In one embodiment, a significant risk is measured as an odds ratio of at least about 1.2, including by not limited to: 1.2, 1.3, 1.4, 1.5, 1.6, 1.7, 1.8, and 1.9. In a further embodiment, an odds ratio of at least 1.2 is significant. In a further embodiment, an odds ratio of at least about 1.5 is significant. In a further embodiment, a significant increase in risk is at least about 1.7 is significant. In a further embodiment, a significant increase in risk is at least about 20%, including but not limited to about 25%, 30%, 35%, 40%, 45%, 50%, 55%, 60%, 65%, 70%, 75%, 80%, 85%, 90%, 95, and 98%. In a further embodiment, a significant increase in risk is at least about 50%. In yet another embodiment, an at-risk haplotype has a p value <0.05. It is understood however, that identifying whether a risk is medically significant may also depend on a variety of factors, including the specific disease, the haplotype, and often, environmental factors.

[0267] The invention also pertains to methods of diagnosing a susceptibility to myocardial infarction, ACS, stroke or PAOD in an individual, comprising screening for an at-risk haplotype in the FLAP nucleic acid that is more frequently present in an individual susceptible to myocardial infarction (affected) or by screening for an at-risk haplotype in LTA4H, compared to the frequency of its presence in a healthy individual (control), wherein the presence of the haplotype is indicative of susceptibility to myocardial infarction. Standard techniques for genotyping for the presence of SNPs and/or microsatellite markers that are associated with myocardial infarction, ACS, stroke or PAOD can be used, such as fluorescent based techniques (Chen, et al., Genome Res. 9, 492 (1999), PCR, LCR, Nested PCR and other techniques for nucleic acid amplification. In a preferred embodiment, the method comprises assessing in an individual the presence or frequency of SNPs and/or microsatellites in the FLAP nucleic acid that are associated with myocardial infarction, ACS, stroke or PAOD, wherein an excess or higher frequency of the SNPs and/or microsatellites compared to a healthy control individual is indicative that the individual is susceptible to myocardial infarction, ACS, stroke or PAOD. See Table 7 for SNPs that comprise haplotypes that can be used as screening tools. See also Tables 13 and 37 that sets forth SNPs and markers for use as screening tools.

[0268] In one embodiment, the at-risk haplotype is characterized by the presence of polymorphism(s) represented in Table 13. For example, SG13S99, where the SNP can be a “C” or a “T”; SG13S25, where the SNP can be a “G” or an “A”; SG13S377, where the SNP can be a “G” or an “A”; SG13S106, where the SNP can be a “G” or an “A”; SG13S114, where the SNP can be a “T” or an “A”; SG13S89, where the SNP can be a “G” or an “A”; SG13S30, where the SNP can be a “G” or a “T”; SG13S32, where the SNP can be a “C” or an “A”; SG13S42, where the SNP can be a “G” or an “A”; and SG13S35, where the SNP can be a “G” or an “A”. In addition, SG13A375, where the SNP can be a “T”, SG13S32, where the SNP can be an “A”, aand SG13S106, where the SNP can be a “G” or an “A”.

[0269] Kits (e.g., reagent kits) useful in the methods of diagnosis comprise components useful in any of the methods described herein, including for example, hybridization probes or primers as described herein (e.g., labeled probes or primers), reagents for detection of labeled molecules, restriction enzymes (e.g., for RFLP analysis), allele-specific oligonucleotides, antibodies which bind to altered or to non-altered (native) FLAP polypeptide or a non-altered (native) LTA4H polypeptide, means for amplification of nucleic acids comprising a FLAP or LTA4H, or means for analyzing the nucleic acid sequence of a nucleic acid described herein, or for analyzing the amino acid sequence of a polypeptide as described herein, etc. In one embodiment, a kit for diagnosing susceptibility to MI, ACS, stroke or PAOD can comprise primers for nucleic acid amplification of a region in the FLAP nucleic acid or LTA4H nucleic acid comprising an at-risk haplotype that is more frequently present in an individual having MI, ACS, stroke or PAOD or susceptible to MI, ACS, stroke or PAOD. The primers can be designed using portions of the nucleic acids flanking SNPs that are indicative of MI. In a particularly preferred embodiment, the primers are designed to amplify regions of the LTA4H nucleic acid associated with an at-risk haplotype for MI, as shown in Table 38 or Table 39, or more particularly the haplotype defined by the microsatellite markers and SNPs at the locus on chromosome 12q23.

[0270] In another particularly preferred embodiment, the primers are designed to amplify regions of the FLAP nucleic acid associated with an at-risk haplotype for MI, ACS, stroke or PAOD, as shown in Table 7, or more particularly the haplotype defined by the following SNP markers: In one embodiment, a haplotype associated with a susceptibility to myocardial infarction, ACS, stroke or PAOD comprises markers SG13S99, SG13S25, SG13S377, SG13S106, SG13S32 and SG13S35 at the 13q12-13 locus. In one particular embodiment, the presence of the alleles T, G, G, G. A and G at SG13S99, SG13S25, SG13S377, SG13S106, SG13S32 and SG13S35, respectively (the B6 haplotype), is diagnostic of susceptibility to myocardial infarction, ACS, stroke or PAOD. In another embodiment, a haplotype associated with a susceptibility to myocardial infarction, ACS, stroke or PAOD comprises markers SG13S99, SG13S25, SG13S106, SG13S30 and SG13S42 at the 13q12-13 locus. In one particular embodiment, the presence of the alleles T, G, G, G and A at SG13S99, SG13S25, SG13S106, SG13S30 and SG13S42, respectively (the B5 haplotype), is diagnostic of susceptibility to myocardial infarction, ACS, stroke or PAOD. In a third embodiment, a haplotype associated with a susceptibility to myocardial infarction, ACS, stroke or PAOD comprises markers SG13S25, SG13S106, SG13S30 and SG13S42 at the 13q12-13 locus. In one particular embodiment, the presence of the alleles G, G, G and A at SG13S25, SG13S106, SG13S30 and SG13S42, respectively (the B4 haplotype), is diagnostic of susceptibility to myocardial infarction, ACS, stroke or PAOD. In a fourth embodiment, a haplotype associated with a susceptibility to myocardial infarction, ACS, stroke or PAOD comprises markers SG13S99, SG13S25, SG13S114, SG13S89 and SG13S32 at the 13q12-13 locus. In one particular embodiment, the presence of the alleles T, G, T, G and A at SG13S99, SG13S25, SG13S114, SG13S89 and SG13S32, respectively (the A5 haplotype), is diagnostic of susceptibility to myocardial infarction, ACS, stroke or PAOD. In a fifth embodiment, a haplotype associated with a susceptibility to myocardial infarction, ACS, stroke or PAOD comprises markers SG13S25, SG13S114, SG13S89 and SG13S32 at the 13q12-12 locus. In one particular-embodiment, the presence of the alleles G, T, G and A at SG13S25, SG13S 114, SG13S89 and SG13S32, respectively (the A4 haplotype), is diagnostic of susceptibility to myocardial infarction, ACS, stroke or PAOD. In another embodiment, a haplotype associated with a susceptibility to myocardial infarction, ACS, stroke or PAOD comprises marker SG13S375 at the 13q12-13 locus. In one particular embodiment, the presence of T at SG13S375, (the HapC1 haplotype) is diagnostic of susceptibility to to myocardial infarction, ACS, stroke or PAOD. In another embodiment, a haplotype associated with a susceptibility to myocardial infarction, ACS, stroke or PAOD comprises markers SG13S25 and SG13S375 at the 13q12-13 locus. In one particular embodiment, the presence of T and G at SG13S375 and SG13S25, respectively (the HapC2 haplotype) is diagnostic of susceptibility to to myocardial infarction, ACS, stroke or PAOD. In another embodiment, a haplotype associated with a susceptibility to myocardial infarction, ACS, stroke or PAOD comprises markers SG13S25, SG13S375 and SG13S32 at the 13q12-13 locus. In one particular embodiment, the presence of T, G and A at SG13S375, SG13S25 and SG13S32, respectively (the HapC3 haplotype) is diagnostic of susceptibility to to myocardial infarction, ACS, stroke or PAOD. In an additional embodiment, a haplotype associated with a susceptibility to myocardial infarction, ACS, stroke or PAOD comprises markers SG13S25, SG13S375, SG13S32 and SG13S106 at the 13q12-13 locus. In one particular embodiment, the presence of T, G, A and G at SG13S375, SG13S25, SG13S32 and SG13S106, respectively (the HapC4-A) haplotype) is diagnostic of susceptibility to to myocardial infarction, ACS, stroke or PAOD. In one particular embodiment, the presence of T, G, A and A at SG13S375, SG13S25, SG13S32 and SG13S106, respectively (the HapC4-B) haplotype) is diagnostic of susceptibility to to myocardial infarction, ACS, stroke or PAOD.

### Screening Assays and Agents Identified Thereby

[0271] The invention provides methods (also referred to herein as “screening assays”) for identifying the presence of a nucleotide that hybridizes to a nucleic acid of the invention, as well as for identifying the presence of a polypeptide encoded by a nucleic acid of the invention. In one embodiment, the presence (or absence) of a nucleic acid molecule of interest (e.g., a nucleic acid that has significant homology with a nucleic acid of the invention) in a sample can be assessed by contacting the sample with a nucleic acid comprising a nucleic acid of the invention (e.g., a nucleic acid having the sequence of one of SEQ ID NOs: 1, 3, 718 or 719 or the complement thereof, or a nucleic acid encoding an amino acid having the sequence of SEQ ID NO: 2, SEQ ID NO: 720, or a fragment or variant of such nucleic acids), under stringent conditions as described above, and then assessing the sample for the presence (or absence) of hybridization. In a preferred embodiment, high stringency conditions are conditions appropriate for selective hybridization. In another embodiment, a sample containing a nucleic acid molecule of interest is contacted with a nucleic acid containing a contiguous nucleic acid sequence (e.g., a primer or a probe as described above) that is at least partially complementary to a part of the nucleic acid molecule of interest (e.g., a FLAP nucleic acid or a LTA4H nucleic acid), and the contacted sample is assessed for the presence or absence of hybridization. In a preferred embodiment, the nucleic acid containing a contiguous nucleic acid sequence is completely complementary to a part of the nucleic acid molecule of interest.

[0272] In any of these embodiments, all or a portion of the nucleic acid of interest can be subjected to amplification prior to performing the hybridization.

[0273] In another embodiment, the presence (or absence) of a polypeptide of interest, such as a polypeptide of the invention or a fragment or variant thereof, in a sample can be assessed by contacting the sample with an antibody that specifically hybridizes to the polypeptide of interest (e.g., an antibody such as those described above), and then assessing the sample for the presence (or absence) of binding of the antibody to the polypeptide of interest.

[0274] In another embodiment, the invention provides methods for identifying agents (e.g., fusion proteins, polypeptides, peptidomimetics, prodrugs, receptors, binding agents, antibodies, small molecules or other drugs, or ribozymes which alter (e.g., increase or decrease) the activity of the polypeptides described herein, or which otherwise interact with the polypeptides herein. For example, such agents can be agents which bind to polypeptides described herein (e.g., binding agent for members of the leukotriene pathway, such as FLAP binding agents or LTA4H binding agents); which have a stimulatory or inhibitory effect on, for example, activity of polypeptides of the invention; or which change (e.g., enhance or inhibit) the ability of the polypeptides of the invention to interact with members of the leukotriene pathway binding agents (e.g., receptors or other binding agents); or which alter posttranslational processing of the leukotriene pathway member polypeptide, such as a FLAP polypeptide or a LTA4H polypeptide (e.g., agents that alter proteolytic processing to direct the polypeptide from where it is normally synthesized to another location in the cell, such as the cell surface; agents that alter proteolytic processing such that more polypeptide is released from the cell, etc.)

[0275] In one embodiment, the invention provides assays for screening candidate or test agents that bind to or modulate the activity of polypeptides described herein (or biologically active portion(s) thereof), as well as agents identifiable by the assays. Test agents can be obtained using any of the numerous approaches in combinatorial library methods known in the art, including: biological libraries; spatially addressable parallel solid phase or solution phase libraries; synthetic library methods requiring deconvolution; the “one-bead one-compound” library method; and synthetic library methods using affinity chromatography selection. The biological library approach is limited to polypeptide libraries, while the other four approaches are applicable to polypeptide, non-peptide oligomer or small molecule libraries of compounds (Lam, K. S., Anticancer Drug Des. 12:145 (1997)).

[0276] In one embodiment, to identify agents which alter the activity of a FLAP polypeptide or a LTA4H polypeptide, a cell, cell lysate, or solution containing or expressing a the polypeptide (e.g., SEQ ID NO: 2, SEQ ID NO; 720 or another splicing variant thereof such as a nucleic acid comprising a SNP as shown in Table 13 or 37), or a fragment or derivative thereof (as described above), can be contacted with an agent to be tested; alternatively, the polypeptide can be contacted directly with the agent to be tested. The level (amount) of polypeptide activity is assessed (e.g., the level (amount) of polypeptide activity is measured, either directly or indirectly), and is compared with the level of activity in a control (i.e., the level of activity of the FLAP or LTA4H polypeptide or active fragment or derivative thereof in the absence of the agent to be tested). If the level of the activity in the presence of the agent differs, by an amount that is statistically significant, from the level of the activity in the absence of the agent, then the agent is an agent that alters the activity of the polypeptide. An increase in the level of polypeptide activity in the presence of the agent relative to the activity in the absence of the agent, indicates that the agent is an agent that enhances the activity. Similarly, a decrease in the level of polypeptide activity in the presence of the agent, relative to the activity in the absence of the agent, indicates that the agent is an agent that inhibits polypeptide activity. In another embodiment, the level of activity of a polypeptide or derivative or fragment thereof in the presence of the agent to be tested, is compared with a control level that has previously been established. A statistically significant difference in the level of the activity in the presence of the agent from the control level indicates that the agent alters polypeptide activity.

[0277] The present invention also relates to an assay for identifying agents which alter the expression of a FLAP nucleic acid or a LTA4H nucleic acid (e.g., antisense nucleic acids, fusion proteins, polypeptides, peptidomimetics, prodrugs, receptors, binding agents, antibodies, small molecules or other drugs, or ribozymes; which alter (e.g., increase or decrease) expression (e.g., transcription or translation) of the nucleic acid or which otherwise interact with the nucleic acids described herein, as well as agents identifiable by the assays. For example, a solution containing a nucleic acid encoding a FLAP polypeptide (e.g., a FLAP nucleic acid) or a nucleic acid encoding a LTA4H polypeptide ( e.g., a LTA4H nucleic acid) can be contacted with an agent to be tested. The solution can comprise, for example, cells containing the nucleic acid or cell lysate containing the nucleic acid; alternatively, the solution can be another solution that comprises elements necessary for transcription/translation of the nucleic acid. Cells not suspended in solution can also be employed, if desired. The level and/or pattern of FLAP or LTA4H expression (e.g., the level and/or pattern of mRNA or of protein expressed, such as the level and/or pattern of different splicing variants) is assessed, and is compared with the level and/or pattern of expression in a control (i.e., the level and/or pattern of the FLAP expression or LTA4H exression in the absence of the agent to be tested). If the level and/or pattern in the presence of the agent differ, by an amount or in a manner that is statistically significant, from the level and/or pattern in the absence of the agent, then the agent is an agent that alters the expression of the FLAP nucleic acid or alters the expression of the LTA4H nucleic acid Enhancement of FLAP expression or LTA4H expression indicates that the agent is an activator of FLAP or LTA4H activity. Similarly, inhibition of FLAP expression or LTA4H expression indicates that the agent is a repressor of FLAP or LTA4H activity.

[0278] In another embodiment, the level and/or pattern of FLAP polypeptide(s) or LTA4H polypeptide(s) (e.g., different splicing variants) in the presence of the agent to be tested, is compared with a control level and/or pattern that have previously been established. A level and/or pattern in the presence of the agent that differs from the control level and/or pattern by an amount or in a manner that is statistically significant indicates that the agent alters FLAP or LTA4H expression.

[0279] In another embodiment of the invention, agents which alter the expression of a FLAP nucleic acid or a LTA4H nucleic acid or which otherwise interact with the nucleic acids described herein, can be identified using a cell, cell lysate, or solution containing a nucleic acid encoding the promoter region of the FLAP or LTA4H nucleic acid operably linked to a reporter gene. After contact with an agent to be tested, the level of expression of the reporter gene (e.g., the level of mRNA or of protein expressed) is assessed, and is compared with the level of expression in a control (i.e., the level of the expression of the reporter gene in the absence of the agent to be tested). If the level in the presence of the agent differs, by an amount or in a manner that is statistically significant, from the level in the absence of the agent, then the agent is an agent that alters the expression of the FLAP or LTA4H nucleic acid, as indicated by its ability to alter expression of a nucleic acid that is operably linked to the FLAP or LTA4H nucleic acid promoter.

[0280] Enhancement of the expression of the reporter indicates that the agent is an activator of expression of the gene of interest. Similarly, inhibition of the expression of the reporter indicates that the agent is a repressor of expression of the gene of interest. In another embodiment, the level of expression of the reporter in the presence of the test agent, is compared with a control level that has previously been established. A level in the presence of the agent that differs from the control level by an amount or in a manner that is statistically significant indicates that the agent alters expression.

[0281] Agents which alter the amounts of different splicing variants encoded by a FLAP nucleic acid or a LTA4H nucleic acid (e.g., an agent which enhances expression of a first splicing variant, and which inhibits expression of a second splicing variant), as well as agents which stimulate activity of a first splicing variant and inhibit activity of a second splicing variant, can easily be identified using these methods described above.

[0282] In one mbodiments of the invention, assays can be used to assess the impact of a test agent on the activity of a polypeptide relative to a FLAP binding agent. For example, a cell that expresses a compound that interacts with a FLAP nucleic acid (herein referred to as a “FLAP binding agent”, which can be a polypeptide or other molecule that interacts with a FLAP nucleic acid, such as a receptor, or another molecule, such as 5-LO) is contacted with a FLAP in the presence of a test agent, and the ability of the test agent to alter the interaction between the FLAP and the FLAP binding agent is determined. Alternatively, a cell lysate or a solution containing the FLAP binding agent, can be used. An agent which binds to the FLAP or the FLAP binding agent can alter the interaction by interfering with, or enhancing the ability of the FLAP to bind to, associate with, or otherwise interact with the FLAP binding agent.

[0283] In other embodiments of the invention, assays can be used to assess the impact of a test agent on the activity of a polypeptide relative to a LTA4H binding agent. For example, a cell that expresses a compound that interacts with a LTA4H nucleic acid (herein referred to as a “LTA4H binding agent”, which can be a polypeptide or other molecule that interacts with a LTA4H nucleic acid, such as a receptor, or another molecule) is contacted with a LTA4H in the presence of a test agent, and the ability of the test agent to alter the interaction between the LTA4H and the LTA4H binding agent is determined. Alternatively, a cell lysate or a solution containing the LTA4H binding agent, can be used. An agent which binds to the LTA4H or the LTA4H binding agent can alter the interaction by interfering with, or enhancing the ability of the LTA4H to bind to, associate with, or otherwise interact with the LTA4H binding agent.

[0284] Determining the ability of the test agent to bind to a nucleic acid or a nucleic acid binding agent can be accomplished, for example, by coupling the test agent with a radioisotope or enzymatic label such that binding of the test agent to the polypeptide can be determined by detecting the labeled with ¹²⁵I, ³⁵S, ¹⁴C or ³H, either directly or indirectly, and the radioisotope detected by direct counting of radioemmission or by scintillation counting. Alternatively, test agents can be enzymatically labeled with, for example, horseradish peroxidase, alkaline phosphatase, or luciferase, and the enzymatic label detected by determination of conversion of an appropriate substrate to product. It is also within the scope of this invention to determine the ability of a test agent to interact with the polypeptide without the labeling of any of the interactants. For example, a microphysiometer can be used to detect the interaction of a test agent with a polypeptide or a polypeptide binding agent without the labeling of either the test agent, the polypeptide, or the polypeptide binding agent. McConnell, H. M. et al., Science 257:1906-1912 (1992). As used herein, a “microphysiometer” (e.g., Cytosensor™) is an analytical instrument that measures the rate at which a cell acidifies its environment using a light-addressable potentiometric sensor (LAPS). Changes in this acidification rate can be used as an indicator of the interaction between ligand and polypeptide.

[0285] Thus, these receptors can be used to screen for compounds that are agonists for use in treating a disease or condition associated with FLAP or LTA4H or a susceptibility to a disease or condition associated with FLAP or LTA4H, or antagonists for studying a susceptibility to a disease or condition associated with FLAP (e.g., MI, ACS, stroke or PAOD). Drugs can be designed to regulate FLAP activation, that in turn can be used to regulate signaling pathways and transcription events of genes downstream or of proteins or polypeptides interacting with FLAP (e.g., 5-LO).

[0286] In another embodiment of the invention, assays can be used to identify polypeptides that interact with one or more polypeptides, as described herein. For example, a yeast two-hybrid system such as that described by Fields and Song (Fields, S. and Song, O., Nature 340:245-246 (1989)) can be used to identify polypeptides that interact with one or more FLAP polypeptides. In such a yeast two-hybrid system, vectors are constructed based on the flexibility of a transcription factor that has two functional domains (a DNA binding domain and a transcription activation domain). If the two domains are separated but fused to two different proteins that interact with one another, transcriptional activation can be achieved, and transcription of specific markers (e.g., nutritional markers such as His and Ade, or color markers such as lacZ) can be used to identify the presence of interaction and transcriptional activation. For example, in the methods of the invention, a first vector is used which includes a nucleic acid encoding a DNA binding domain and also a FLAP or LTA4H polypeptide of the invention, splicing variant, or fragment or derivative thereof, and a second vector is used which includes a nucleic acid encoding a transcription activation domain and also a nucleic acid encoding a polypeptide which potentially may interact with the FLAP or LTA4H polypeptide, splicing variant, or fragment or derivative thereof (e.g., a FLAP polypeptide binding agent or receptor, or a LTA4H polypeptide binding agent or receptor). Incubation of yeast containing the first vector and the second vector under appropriate conditions (e.g., mating conditions such as used in the Matchmaker™ system from Clontech (Palo Alto, Calif., USA)) allows identification of colonies that express the markers of interest. These colonies can be examined to identify the polypeptide(s) that interact with the polypeptide of interest or fragment or derivative thereof. Such polypeptides may be useful as agents that alter the activity or expression of a FLAP polypeptide or alter the activity or expression of a LTA4H polypeptide, as described above.

[0287] In more than one embodiment of the above assay methods of the present invention, it may be desirable to immobilize either the FLAP or LTA4H, the FLAP or LTA4H binding agent, or other components of the assay on a solid support, in order to facilitate separation of complexed from uncomplexed forms of one or both of the polypeptides, as well as to accommodate automation of the assay. Binding of a test agent to the polypeptide, or interaction of the polypeptide with a binding agent in the presence and absence of a test agent, can be accomplished in any vessel suitable for containing the reactants. Examples of such vessels include microtitre plates, test tubes, and micro-centrifuge tubes. In one embodiment, a fusion protein (e.g., a glutathione-S-transferase fusion protein) can be provided which adds a domain that allows a FLAP or LTA4H nucleic acid or a FLAP or LTA4H binding agent to be bound to a matrix or other solid support.

[0288] In one embodiment, modulators of expression of nucleic acid molecules of the invention are identified in a method wherein a cell, cell lysate, or solution containing a nucleic acid encoding a FLAP polypeptide or a LTA4H polypeptide is contacted with a test agent and the expression of appropriate mRNA or polypeptide (e.g., splicing variant(s)) in the cell, cell lysate, or solution, is determined. The level of expression of appropriate mRNA or polypeptide(s) in the presence of the test agent is compared to the level of expression of mRNA or polypeptide(s) in the absence of the test agent. The test agent can then be identified as a modulator of expression based on this comparison. For example, when expression of mRNA or polypeptide is greater (statistically significantly greater) in the presence of the test agent than in its absence, the test agent is identified as a stimulator or enhancer of the mRNA or polypeptide expression. Alternatively, when expression of the mRNA or polypeptide is less (statistically significantly less) in the presence of the test agent than in its absence, the test agent is identified as an inhibitor of the mRNA or polypeptide expression. The level of mRNA or polypeptide expression in the cells can be determined by methods described herein for detecting mRNA or polypeptide.

[0289] In yet another embodiment, the invention provides methods for identifying agents (e.g., fusion proteins, polypeptides, peptidomimetics, prodrugs, receptors, binding agents, antibodies, small molecules or other drugs, or ribozymes) which alter (e.g., increase or decrease) the activity of a member of leukotriene pathway binding agent, such as a FLAP binding agent (e.g., 5-LO) or a LTA4H binding agent, as described herein. For example, such agents can be agents which have a stimulatory or inhibitory effect on, for example, the activity of a member of leukotriene pathway binding agent, such as a FLAP binding agent or a LTA4H binding agnet; which change (e.g., enhance or inhibit) the ability a member of leukotriene pathway binding agents, (e.g., receptors or other binding agents) to interact with the polypeptides of the invention; or which alter posttranslational processing of the member of leukotriene pathway binding agent, (e.g., agents that alter proteolytic processing to direct the member of the leukotriene pathway binding agent from where it is normally synthesized to another location in the cell, such as the cell surface; agents that alter proteolytic processing such that more active binding agent is released from the cell, etc.).

[0290] For example, the invention provides assays for screening candidate or test agents that bind to or modulate the activity of a member of the leukotriene pathway (or enzymatically active portion(s) thereof), as well as agents identifiable by the assays. As described above, test agents can be obtained using any of the numerous approaches in combinatorial library methods known in the art, including: biological libraries; spatially addressable parallel solid phase or solution phase libraries; synthetic library methods requiring deconvolution; the “one-bead one-compound” library method; and synthetic library methods using affinity chromatography selection. The biological library approach is limited to polypeptide libraries, while the other four approaches are applicable to polypeptide, non-peptide oligomer or small molecule libraries of compounds (Lam, K. S. Anticancer Drug Des., 12:145 (1997)).

[0291] In one embodiment, to identify agents which alter the activity of a member of the leukotriene pathway (such as a FLAP binding agent, LTA4H binding agent or an agent which binds to a member of the leukotriene pathway (a “binding agent”)), a cell, cell lysate, or solution containing or expressing a binding agent (e.g., 5-LO, or a leukotriene pathway member receptor, or other binding agent), or a fragment (e.g., an enzymatically active fragment) or derivative thereof, can be contacted with an agent to be tested; alternatively, the binding agent (or fragment or derivative thereof) can be contacted directly with the agent to be tested. The level (amount) of binding agent activity is assessed (either directly or indirectly), and is compared with the level of activity in a control (i.e., the level of activity in the absence of the agent to be tested). If the level of the activity in the presence of the agent differs, by an amount that is statistically significant, from the level of the activity in the absence of the agent, then the agent is an agent that alters the activity of the member of the leukotriene pathway. An increase in the level of the activity relative to a control, indicates that the agent is an agent that enhances (is an agonist of) the activity. Similarly, a decrease in the level of activity relative to a control, indicates that the agent is an agent that inhibits (is an antagonist of) the activity. In another embodiment, the level of activity in the presence of the agent to be tested, is compared with a control level that has previously been established. A level of the activity in the presence of the agent that differs from the control level by an amount that is statistically significant indicates that the agent alters the activity.

[0292] This invention further pertains to novel agents identified by the above-described screening assays. Accordingly, it is within the scope of this invention to further use an agent identified as described herein in an appropriate animal model. For example, an agent identified as described herein (e.g., a test agent that is a modulating agent, an antisense nucleic acid molecule, a specific antibody, or a polypeptide-binding agent) can be used in an animal model to determine the efficacy, toxicity, or side effects of treatment with such an agent. Alternatively, an agent identified as described herein can be used in an animal model to determine the mechanism of action of such an agent.

[0293] Furthermore, this invention pertains to uses of novel agents identified by the above-described screening assays for treatments as described herein. In addition, an agent identified as described herein can be used to alter activity of a polypeptide encoded by a FLAP nucleic acid or a LTA4H nucleic acid, or to alter expression of a FLAP nucleic acid or LTA4H nucleic acid, by contacting the polypeptide or the nucleic acid (or contacting a cell comprising the polypeptide or the nucleic acid) with the agent identified as described herein.

[0294] The present invention is now illustrated by the following Examples, which are not intended to be limiting in any way. The teachings of all references cited are incorporated herein in their entirety.

### EXAMPLE 1

### Identification of Gene and Haplotypes Associated With MI

[0295] A genome wide scan of 296 multiplex Icelandic families with 713 MI patients was performed. Through the suggestive linkage to a locus on chromosome 13q12-13 for female MI patients and early onset MI patients, and haplotype association analysis, the gene encoding the 5-lipoxygenase activating protein (FLAP) was identified, and a 4-SNP haplotype within the gene was determined to confer a near 2-fold risk of MI. Male patients showed strongest association to the at-risk haplotype. Independent confirmation of FLAP association to MI was obtained in a British cohort of patients with sporadic MI. These findings support FLAP as the first specific gene isolated that confers substantial risk of the complex trait of MI.

### Methods

[0296] Study Population

[0297] Patients entering the study were recruited from a registry that includes all MIs that occurred before the age of 75 (over 8,000 patients) in Iceland from 1981 to 2000. This registry is a part of the World Health Organization MONICA Project (The World Health Organization MONICA Project, WHO MONICA Project Principal Investigators,. J Clin Epidemiol 41, 105-14 (1988)). Diagnoses of all patients in the registry followed strict diagnostic rules based on signs, symptoms, electrocardiograms, cardiac enzymes, and necropsy findings.

[0298] Genotypes from 713 MI patients and 1741 of their first-degree relatives were used in the linkage analysis. For the microsatellite association study of the MI locus, 802 unrelated MI patients (n=233 females, n=624 males and n=302 early onset) and 837 population-based controls were used. For the SNP association study in and around the FLAP gene 779 unrelated MI patients were genotyped (n=293 females, n=486 males and n=358 early onset). The control group for the SNP association study was population based and comprised of 628 unrelated males and females in the age range of 30-85 years whose medical history was unknown.

[0299] The study was approved by the Data Protection Commission of Iceland and the National Bioethics Committee of Iceland. Informed consent was obtained from all study participants. Personal identifiers associated with medical information and blood samples were encrypted with a third party encryption system as previously described (Gulcher, J. R., Kristjansson, K., Gudbjartsson, H. & Stefansson, K.,. Eur J Hum Genet 8, 739-42 (2000)).

### Statistical Analysis

[0300] A genome-wide scan was performed as previously described (Gretarsdottir, S. et al. Am J Hum Genet 70, 593-603 (2002)), using a set of approximately 1000 microsatellite markers. Multipoint, affected-only allele-sharing methods (Kong, A. & Cox, N. J., Am J Hum Genet 61, 1179-88 (1997)) were used to assess the evidence for linkage. All results were obtained using the program Allegro (Gudbjartsson, D. F., Jonasson, K., Frigge, M. L. & Kong, A. Allegro, Nat Genet 25, 12-3 (2000)) and the deCODE genetic map (Kong, A. et al., Nat Genet 31, 241-7 (2002)). The Sₚₐᵢᵣₛ scoring function (Whittemore, A. S. & Halpern, J., Biometrics 50, 118-27 (1994); Kruglyak, L., Daly, M. J., Reeve-Daly, M. P. & Lander, E. S., Am J Hum Genet 58, 1347-63 (1996)) was used, as was the exponential allele-sharing model (Kong, A. & Cox, N. J. Am J Hum Genet 61, 1179-88 (1997)) to generate the relevant 1-df (degree of freedom) statistics. When combining the family scores to obtain an overall score, a weighting scheme was used that is halfway on a log scale between weighting each affected pair equally and weighting each family equally. In the analysis, all genotyped individuals who are not affected are treated as “unknown”. Because of concern with small sample behaviour, corresponding P values were usually computed in two different ways for comparison, and the less significant one was reported. The first P value is computed based on large sample theory; Zₗᵣ=√(2 logₑ(10) LOD) and is distributed approximately as a standard normal distribution under the null hypothesis of no linkage (Kong, A. & Cox, N. J. Am J Hum Genet 61, 1179-88 (1997)). A second P value is computed by comparing the observed LOD score to its complete data sampling distribution under the null hypothesis (Gudbjartsson, D. F., Jonasson, K., Frigge, M. L. & Kong, A. Allegro,. Nat Genet 25, 12-3 (2000)). When a data set consists of more than a handful of families, these two P values tend to be very similar. The information measure that was used (Nicolae, D. University of Chicago (1999)), and is implemented in Allegro, is closely related to a classical measure of information (Dempster, A., Laird, N M, Rubin, D B., J R Stat Soc B 39, 1-38 (1977) and has a property that is between 0, if the marker genotypes are completely uninformative, and 1, if the genotypes determine the exact amount of allele sharing by descent among the affected relatives.

[0301] For single-marker association studies, Fisher's exact test was used to calculate two-sided P values for each allele. All P values were unadjusted for multiple comparisons unless specifically indicated. Allelic rather than carrier frequencies were presented for microsatellites, SNPs and haplotypes. To minimize any bias due to the relatedness of the patients that were recruited as families for the linkage analysis first and second-degree relatives were eliminated from the patient list. For the haplotype analysis, the program NEMO was used (Gretarsdottir, S. et al., Nat Genet 35, 131-8 (2003)), which handles missing genotypes and uncertainty with phase through a likelihood procedure, using the expectation-maximization algorithm as a computational tool to estimate haplotype frequencies. Under the null hypothesis, the affected individuals and controls are assumed to have identical haplotype frequencies. Under the alternative hypotheses, the candidate at-risk haplotype is allowed to have a higher frequency in the affected individuals than in controls, while the ratios of frequencies of all other haplotypes are assumed to be the same in both groups. Likelihoods are maximized separately under both hypotheses, and a corresponding 1-df likelihood ratio statistic used to evaluate statistical significance (id). Even though searches were only performed for haplotypes that increase the risk, all reported P values are two-sided unless otherwise stated. To assess the significance of the haplotype association corrected for multiple testing, a randomisation test was carried out using the same genotype data. The cohorts of affected individuals and controls were randomized, and the analysis was repeated. This procedure was repeated up to 1.000 times and the P value presented is the fraction of replications that produced a P value for a haplotype tested that is lower than or equal to the P value observed using the original patient and control cohorts.

[0302] For both single-marker and haplotype analysis, relative risk (RR) and population attributable risk was calculated assuming a multiplicative model (Terwilliger, J. D. & Ott, J. A., Hum Hered 42, 337-46 (1992); Falk, C. T. & Rubinstein, P., Ann Hum Genet 51 (Pt 3), 227-33 (1987)) in which the risk of the two alleles of haplotypes a person carries multiply. LD was calculated between pairs of SNPs using the standard definition of D′ (Lewontin, R. C., Genetics 50, 757-82 (1964)) and R² (Hill, W. G. & Robertson, A., Genetics 60, 615-28 (1968)). Using NEMO, frequencies of the two marker allele combinations are estimated by maximum likelihood, and deviation from linkage equilibrium is evaluated by a likelihood ratio test. When plotting all SNP combinations to elucidate the LD structure in a particular region, D′ was plotted in the upper left corner and the P value in the lower right corner. In the LD plots presented, the markers are plotted equidistantly rather than according to their physical positions.

### Identification of DNA Polymorphisms

[0303] New polymorphic repeats (e.g., dinucleotide or trinucleotide repeats) were identified with the Sputnik program. For microsatellite alleles: the CEPH sample 1347-02 (Centre d'Etudes du Polymorphisme Humain, genomics repository) is used as a reference. The lower allele of each microsatellite in this sample is set at 0 and all other alleles in other samples are numbered according in relation to this reference. Thus allele1 is 1 bp longer than the lower allele in the CEPH sample, allele 2 is 2 bp longer than the lower allele in the CEPH sample, allele 3 is 3 bp longer than the lower allele in the CEPH sample, allele 4 is 4 bp longer than the lower allele in the CEPH sample, allele −1 is 1 bp shorter than the lower allele in the CEPH sample, allele −2 is 2 bp shorter than the lower allele in the CEPH sample, and so on. Single nucleotide polymorphisms in the gene were detected by PCR sequencing exonic and intronic regions from patients and controls. Public single nucleotide polymorphisms were obtained from the NCBI SNP database. SNPs were genotyped using a method for detecting SNPs with fluorescent polarization template-directed dye-terminator incorporation (SNP-FP-TDI assay) (Chen, X., Zehnbauer, B., Gnirke, A. & Kwok, P. Y., Proc Natl Acad Sci USA 94, 10756-61. (1997)) and TaqMan assays (Applied Biosystems).

### Results

[0304] Linkage Analysis

[0305] A genome wide scan was performed in search of MI susceptibility genes using a framework set of around 1000 microsatellite markers. The initial linkage analysis included 713 MI patients who fulfilled the WHO MONICA research criteria (The World Health Organization MONICA Project, WHO MONICA Project Principal Investigators,. J Clin Epidemiol 41, 105-14 (1988)) and were clustered in 296 extended families. The linkage analysis was also repeated for early onset, male and female patients separately. Description of the number of patients and families in each analysis are provided in Table 1.

TABLE 1
Number of patients that cluster into families and the
corresponding number of families used in the linkage analysis

| | Number of | Number of | Number of | Genotyped |
|---|---|---|---|---|
| Phenotype | patients | families | pairs | relatives^{a} |
| All MI patients | 713 | 296 | 863 | 1741 |
| Males | 575 | 248 | 724 | 1385 |
| Females | 140 | 56 | 108 | 366 |
| Early onset | 194 | 93 | 156 | 739 |

^{a}Genotyped relatives were used to increase the information on IBD sharing among the patients in the linkage analysis

[0306] None of these analyses yielded a locus of genome-wide significance. However, the most promising LOD score (LOD=2.86) was observed on chromosome 13q12-13 for female MI patients at the peak marker D13S289 (data not shown). This locus also had the most promising LOD score (LOD=2.03) for patients with early onset MI. After increasing the information on identity-by-descent sharing to over 90% by typing 14 additional microsatellite markers in a 30 centiMorgan (cM) region around D13S289, the LOD score from the female analysis dropped to 2.48 (P value=0.00036), while the highest LOD score remained at D13S289 (FIG. 6.1).

[0307] Microsatellite Association Study

[0308] The 7.6 Mb region that corresponds to a drop of one in LOD score in the female MI linkage analysis, contains 40 known genes (Table 2).

TABLE 2
Genes residing within the one LOD drop region of the chromosome
13q12-13 linkage peak.

| LL_Symbol | LL_gene_name |
|---|---|
| USP12L1 | ubiquitin specific protease 12 like 1 |
| RPL21 | ribosomal protein L21 |
| GTF3A | general transcription factor IIIA |
| MTIF3 | mitochondrial translational initiation factor 3 |
| PDZRN1 | PDZ domain containing ring finger 1 |
| MGC9850 | hypothetical protein MGC9850 |
| POLR1D | polymerase (RNA) I polypeptide D, 16 kDa |
| GSH1 | GS homeobox 1 |
| IPF1 | insulin promoter factor 1, homeodomain transcription factor |
| CDX2 | caudal type homeo box transcription factor 2 |
| FLT3 | fms-related tyrosine kinase 3 |
| LOC255967 | hypothetical protein LOC255967 |
| FLT1 | fms-related tyrosine kinase 1 (vascular endothelial growth |
| | factor/vascular permeability factor receptor) |
| C13orf12 | chromosome 13 open reading frame 12 |
| LOC283537 | hypothetical protein LOC283537 |
| KIAA0774 | KIAA0774 protein |
| SLC7A1 | solute carrier family 7 (cationic amino acid transporter, |
| | y+ system), member 1 |
| UBL3 | ubiquitin-like 3 |
| MGC2599 | hypothetical protein MGC2599 similar to katanin p60 |
| | subunit A 1 2599 |
| HMGB1 | high-mobility group box 1 |
| D13S106E | highly charged protein |
| ALOX5AP | arachidonate 5-lipoxygenase-activating protein |
| FLJ14834 | hypothetical protein FLJ14834 |
| MGC40178 | hypothetical protein MGC40178 |
| HSPH1 | heat shock 105 kDa/110 kDa protein 1 |
| B3GTL | beta 3-glycosyltransferase-like |
| GREAT | similar to G protein coupled receptor affecting testicular |
| | descent (H. sapiens) |
| LOC196549 | similar to hypothetical protein FLJ20897 |
| 13CDNA73 | hypothetical protein CG003 |
| BRCA2 | breast cancer 2, early onset |
| CG018 | hypothetical gene CG018 |
| PRO0297 | PRO0297 protein |
| LOC88523 | CG016 |
| CG012 | hypothetical gene CG012 |
| CG030 | hypothetical gene CG030 |
| CG005 | hypothetical protein from BCRA2 region |
| APRIN | androgen-induced proliferation inhibitor |
| KL | Klotho |
| STARD13 | START domain containing 13 |
| RFC3 | replication factor C (activator 1) 3, 38 kDa |

[0309] To determine which gene in this region most likely contributes to MI, 120 microsatellite markers positioned within this region were typed, and a case-control association study was performed using 802 unrelated MI patients and 837 population-based controls. The association study was also repeated for each of the three phenotypes that were used in the linkage study, i.e. early onset, male and female MI patients.

[0310] The initial association analysis was performed when the average spacing between microsatellite markers was approximately 100 kb. This analysis revealed several extended haplotypes composed of 4 and 5 microsatellite markers that were significantly associated with female MI (see FIGS. 1 and 2, and Tables 13 and 14). A region common to all these extended haplotypes, is defined by markers DG13S166 and D13S1238. This region included only one gene, the FLAP nucleic acid sequence. The two marker haplotype involving alleles 0 and −2 for markers DG13S166 and D13S1238, respectively, was found in excess in patients.

[0311] This was the first evidence that the FLAP gene might be involved in the pathogenesis of myocardial infarction.

[0312] Subsequent haplotype analysis that included more microsatellite markers (n=120) in the candidate region on chromosome 13q12-13, now with a marker density of 1 microsatellite marker per 60 kb, showed decreased significance of the original haplotype association. However, the haplotype association analysis using increased density of markers again pointed towards the FLAP gene. This analysis strongly suggested that a 300 kb region was involved in the susceptibility of myocardial infarction. As shown in FIG. 5.2, the haplotype that showed association to all MI with the lowest P value (0.00009) covered a region that contains 2 known genes, including the gene encoding arachidonate 5-lipoxygenase-activating protein (FLAP) and a gene with an unknown function called highly charged protein. However, the haplotype association to female MI in this region was less significant (P value=0.005) than for all MI patients and to our surprise, the most significant haplotype association was observed for male MI patients (P value=0.000002). This male MI haplotype was the only haplotype that remained significant after adjusting for all haplotypes tested.

[0313] In view of the association results described above, FLAP was an attractive candidate and therefore efforts were focused on this gene.

[0314] Screening for Polymorphisms in FLAP and Linkage Disequilibrium Mapping

[0315] To determine whether variations within the FLAP gene significantly associate with MI and to search for causal variations, the FLAP gene was sequenced in 93 patients and 93 controls. The sequenced region covers 60 kb containing the FLAP gene, including the 5 known exons and introns and the 26 kb region 5′ to the first exon and 7 kb region 3′ to the fifth exon. In all, 144 SNPs were identified, of those 96 were excluded from further analysis either because of low minor allele frequency or they were completely correlated with other SNPs and thus redundant. FIG. 6 shows the distribution of the 48 SNPs, used for genotyping, relative to exons, introns and the 5′ and 3′flanking regions of the FLAP gene. Only one SNP was identified within a coding sequence (exon 2). This SNP did not lead to amino acid substitution. The locations of these SNPs in the NCBI human genome assembly, build 34, are listed in Table 3.

TABLE 3
Locations of all genotyped SNPs in NCBI build 34 of the
human genome assembly

| SNP name | Build34 start |
|---|---|
| SG13S381 | 29083350 |
| SG13S366 | 29083518 |
| SG13S1 | 29086224 |
| SG13S2 | 29087473 |
| SG13S367 | 29088090 |
| SG13S10 | 29088473 |
| SG13S3 | 29089044 |
| SG13S368 | 29089886 |
| SG13S4 | 29090997 |
| SG13S5 | 29091307 |
| SG13S90 | 29091780 |
| SG13S6 | 29092536 |
| SG13S371 | 29093964 |
| SG13S372 | 29094259 |
| SG13S373 | 29096688 |
| SG13S375 | 29096874 |
| SG13S376 | 29096962 |
| SG13S25 | 29097553 |
| SG13S377 | 29101965 |
| SG13S100 | 29104271 |
| SG13S95 | 29106329 |
| SG13S191 | 29107830 |
| SG13S106 | 29108579 |
| SG13S114 | 29110096 |
| SG13S121 | 29112174 |
| SG13S122 | 29112264 |
| SG13S43 | 29112455 |
| SG13S192 | 29116308 |
| SG13S88 | 29116401 |
| SG13S137 | 29118118 |
| SG13S86 | 29118815 |
| SG13S87 | 29118873 |
| SG13S39 | 29119740 |
| SG13S26 | 29122253 |
| SG13S27 | 29122283 |
| SG13S29 | 29123643 |
| SG13S89 | 29124441 |
| SG13S96 | 29124906 |
| SG13S30 | 29125840 |
| SG13S97 | 29129139 |
| SG13S32 | 29130547 |
| SG13S41 | 29134045 |
| SG13S42 | 29135877 |
| SG13S34 | 29137100 |
| SG13S35 | 29138117 |
| SG13S181 | 29138633 |
| SG13S184 | 29139435 |
| SG13S188 | 29140805 |

[0316] In addition to the SNPs, a polymorphism consisting of a monopolymer A repeat that has been described in the FLAP promoter region was typed (Koshino, T. et al.,. Mol Cell Biol Res Commun 2, 32-5 (1999)).

[0317] The linkage disequilibrium (LD) block structure defined by the 48 SNPs that were selected for further genotyping is shown in FIG. 8. A strong LD was detected across the FLAP region, although it appears that at least one recombination may have occurred dividing the region into two strongly correlated LD blocks.

[0318] Haplotype Association to MI

[0319] To perform a case-control association study the 48 selected SNPs and the monopolymer A repeat marker were genotyped in a set of 779 unrelated MI patients and 628 population-based controls. Each of the 49 markers were tested individually for association to the disease. Three SNPs, one located 3 kb upstream of the first exon and the other two 1 and 3 kb downstream of the first exon, showed nominally significant association to MI (Table 4).

TABLE 4
SNP allelic association in the MI cohort

| Pheno- | | Al- | P | | # | % | # | % |
|---|---|---|---|---|---|---|---|---|
| type | Marker | lele | value | RR | Pat. | Pat. | Ctrl | Ctrl |
| All | SG13S106 | G | 0.0044 | 1.29 | 681 | 72.0 | 530 | 66.6 |
| patients | SG13S100 | A | 0.020 | 1.29 | 388 | 69.6 | 377 | 63.9 |
| | SG13S114 | T | 0.021 | 1.21 | 764 | 70.0 | 602 | 65.8 |
| Males | SG13S106 | G | 0.0037 | 1.35 | 422 | 72.9 | 530 | 66.6 |
| | SG13S100 | A | 0.0099 | 1.36 | 292 | 70.7 | 377 | 63.9 |
| | SG13S114 | T | 0.026 | 1.24 | 477 | 70.4 | 602 | 65.8 |
| Early | SG13S100 | A | 0.0440 | 1.43 | 99 | 71.7 | 377 | 63.9 |
| onset | | | | | | | | |

[0320] Nominally significant SNP association with corresponding number of patients (# Pat.) and controls (#Ctrl). RR refers to relative risk.

[0321] However, after adjusting for the number of markers tested, these results were not significant. A search was then conducted for haplotypes that show association to the disease using the same cohorts. For computational reasons, the search was limited to haplotype combinations constructed out of two, three or four SNPs and only haplotypes that were in excess in the patients were tested. The resulting P values were adjusted for all the haplotypes tested by randomizing the patients and controls (see Methods).

[0322] Several haplotypes were found that were significantly associated to the disease with an adjusted P value less that 0.05 (Table 5).

TABLE 5
SNP haplotypes that significantly associate with Icelandic MI patients

| SG13S4 | SG13S6 | SG13S372 | SG13S25 | SG13S377 | SG13S100 | SG13S95 | SG13S114 | SG13S192 | SG13S137 | SG13S86 | SG13S87 | SG13S39 |
|---|---|---|---|---|---|---|---|---|---|---|---|---|
| | | | G | | | | T | | | | | |
| | | | G | | | | T | | | | A | |
| | | | G | | | | T | | | | | |
| | | | G | | A | | | | | | A | |
| | | | G | | | T | T | | | | | |
| | | | G | | | | T | | | G | | |
| | | | G | | A | | | | | | | |
| | | | G | | A | | | | | | | |
| | | | G | | | | T | | | | | |
| | | | G | | | | T | | | | | |
| | G | | | | | T | T | | | | | |
| | | | G | | A | | | | | G | | |
| | | | G | | | | T | A | | | | |
| | | | G | | | | T | | | | | |
| | G | | | | | | T | | | | | |
| | G | | G | | | | T | | | | | |
| | G | | | | A | | | | | | | |
| | | | G | | A | | | | | | | |
| | G | | | | A | | | | | | A | |
| | | | G | | A | | | | | | | |
| | G | | | | | | T | | | | A | |
| | | | G | | A | | | A | | | | |
| | | | G | | | | T | | | | | G |
| | G | | | | A | | | | | | | |
| | G | | | | | | T | | | | | |
| | | | G | | A | | | | | | | |
| | G | | | | | | T | | | | | |
| | G | | G | | A | | | | | | | |
| | | | G | | A | | | A | | | | |
| | | | G | | | | T | A | | | | |
| | | | G | | A | | | A | | | | |
| | | | G | | | | T | | C | | | |
| | | | G | | | | T | | | | | |
| | | | G | | | | T | | C | | | |
| | | | G | G | A | | | | | | | |
| | G | | | | | | T | | | | | |
| | G | | | | | | T | | | G | | |
| | G | | | | A | | | | | | | |
| | | | G | | A | | | | | | | G |
| C | G | | | | A | | | | | | | |
| | G | | | | | | T | A | | | | |
| | G | | | | A | | | | | | | |
| | G | | | | | | T | | | | | |
| | | | G | | | | T | | | | | |
| | G | G | | | A | | | | | | | |
| | G | | G | | A | | | A | | | | |

| SG13S27 | SG13S89 | SG13S96 | SG13S32 | SG13S41 | SG13S42 | SG13S34 | SG13S188 | P value^{a} | P value^{b} | Pat.frq | Ctrl.frq | RR | D′^{c} |
|---|---|---|---|---|---|---|---|---|---|---|---|---|---|
| | G | | A | | | | | 0.0000023 | 0.005 | 0.158 | 0.095 | 1.80 | 1.00 |
| | | | A | | | | | 0.0000030 | 0.006 | 0.158 | 0.095 | 1.78 | 1.00 |
| | | | A | | | T | | 0.0000032 | 0.007 | 0.157 | 0.094 | 1.79 | 1.00 |
| | | | A | | | | | 0.0000046 | 0.012 | 0.158 | 0.083 | 2.07 | 0.89 |
| | | | A | | | | | 0.0000047 | 0.012 | 0.154 | 0.093 | 1.78 | 1.00 |
| | | | A | | | | | 0.0000055 | 0.015 | 0.147 | 0.087 | 1.81 | 1.00 |
| | | | A | | | T | | 0.0000061 | 0.017 | 0.157 | 0.083 | 2.07 | 0.89 |
| | G | | A | | | | | 0.0000063 | 0.017 | 0.157 | 0.084 | 2.04 | 0.89 |
| | | | A | | | | | 0.0000070 | 0.021 | 0.157 | 0.096 | 1.76 | 1.00 |
| | | A | A | | | | | 0.0000075 | 0.022 | 0.149 | 0.089 | 1.78 | 1.00 |
| | | | A | | | | | 0.0000083 | 0.024 | 0.208 | 0.139 | 1.62 | 0.99 |
| | | | A | | | | | 0.0000084 | 0.026 | 0.145 | 0.074 | 2.14 | 0.88 |
| | | | A | | | | | 0.0000084 | 0.026 | 0.139 | 0.082 | 1.82 | 1.00 |
| G | | | A | | | | | 0.0000091 | 0.028 | 0.156 | 0.096 | 1.75 | 1.00 |
| | | | A | | | T | | 0.0000094 | 0.028 | 0.210 | 0.141 | 1.61 | 0.99 |
| | | | A | | | | | 0.0000100 | 0.028 | 0.156 | 0.096 | 1.74 | 1.00 |
| | | | A | | | | A | 0.0000101 | 0.028 | 0.215 | 0.133 | 1.80 | 0.81 |
| | | | A | | | | | 0.0000105 | 0.028 | 0.157 | 0.084 | 2.03 | 0.89 |
| | | | A | | | | | 0.0000108 | 0.029 | 0.214 | 0.133 | 1.78 | 0.81 |
| | | A | A | | | | | 0.0000110 | 0.030 | 0.146 | 0.075 | 2.10 | 0.88 |
| | | | A | | | | | 0.0000112 | 0.030 | 0.212 | 0.144 | 1.60 | 1.00 |
| | | | | | | T | | 0.0000113 | 0.030 | 0.151 | 0.081 | 2.03 | 0.78 |
| | | | A | | | | | 0.0000118 | 0.031 | 0.156 | 0.096 | 1.73 | 1.00 |
| | | | A | | | T | | 0.0000126 | 0.034 | 0.212 | 0.131 | 1.79 | 0.79 |
| | G | | A | | | | | 0.0000129 | 0.035 | 0.211 | 0.144 | 1.59 | 1.00 |
| G | | | A | | | | | 0.0000134 | 0.035 | 0.156 | 0.084 | 2.01 | 0.89 |
| | | | A | | | | | 0.0000136 | 0.036 | 0.211 | 0.143 | 1.60 | 1.00 |
| | | | A | | | | | 0.0000137 | 0.036 | 0.156 | 0.085 | 2.00 | 0.89 |
| | | A | | | | | | 0.0000148 | 0.037 | 0.151 | 0.081 | 2.01 | 0.78 |
| | | | | | | T | | 0.0000150 | 0.037 | 0.160 | 0.099 | 1.73 | 0.87 |
| | | | A | | | | | 0.0000150 | 0.037 | 0.130 | 0.066 | 2.13 | 0.90 |
| | | | | | | T | | 0.0000154 | 0.039 | 0.152 | 0.094 | 1.73 | 0.93 |
| | | | A | | A | | | 0.0000154 | 0.040 | 0.155 | 0.097 | 1.70 | 1.00 |
| | | | A | | | | | 0.0000157 | 0.040 | 0.141 | 0.085 | 1.76 | 1.00 |
| | | | A | | | | | 0.0000158 | 0.040 | 0.152 | 0.084 | 1.94 | 0.90 |
| G | | | A | | | | | 0.0000163 | 0.040 | 0.210 | 0.143 | 1.59 | 0.99 |
| | | | A | | | | | 0.0000166 | 0.041 | 0.200 | 0.134 | 1.61 | 0.92 |
| | G | | A | | | | | 0.0000168 | 0.042 | 0.213 | 0.133 | 1.76 | 0.81 |
| | | | A | | | | | 0.0000168 | 0.042 | 0.156 | 0.084 | 2.00 | 0.89 |
| | | | A | | | | | 0.0000171 | 0.042 | 0.211 | 0.136 | 1.70 | 0.81 |
| | | | A | | | | | 0.0000183 | 0.043 | 0.192 | 0.128 | 1.62 | 0.85 |
| | | | A | | | | | 0.0000184 | 0.043 | 0.212 | 0.132 | 1.77 | 0.81 |
| | | | | A | | T | | 0.0000193 | 0.046 | 0.328 | 0.251 | 1.46 | 0.99 |
| G | | | | | | T | | 0.0000194 | 0.046 | 0.175 | 0.115 | 1.64 | 0.98 |
| | | | A | | | | | 0.0000202 | 0.048 | 0.210 | 0.136 | 1.70 | 0.81 |
| | | | | | | | | 0.0000209 | 0.049 | 0.151 | 0.082 | 2.00 | 0.76 |

^{a}Single test P values.
^{b}P values adjusted for all the SNP haplotypes tested.
^{c}Measure of correlation with Haplotype A4.

[0323] The most significant association was observed for a four SNP haplotype spanning 33 kb, including the first four exons of the gene (FIG. 6.3), with a nominal P value of 0.0000023 and an adjusted P value of 0.005. This haplotype, labelled A4, has haplotype frequency of 15.8% (carrier frequency 30.3%) in patients versus 9.5% (carrier frequency 17.9%) in controls (Table 6).

TABLE 6
Association of the A4 haplotype to MI, Stroke and PAOD

| Phenotype (n) | Frq. Pat. | RR | PAR | P-value | P-value^{a} |
|---|---|---|---|---|---|
| MI (779) | 0.158 | 1.80 | 0.135 | 0.0000023 | 0.005 |
| Males (486) | 0.169 | 1.95 | 0.158 | 0.00000091 | ND^{b} |
| Females (293) | 0.138 | 1.53 | 0.094 | 0.0098 | ND |
| Early onset (358) | 0.138 | 1.53 | 0.094 | 0.0058 | ND |
| Stroke (702)^{c} | 0.149 | 1.67 | 0.116 | 0.000095 | ND |
| Males (373) | 0.156 | 1.76 | 0.131 | 0.00018 | ND |
| Females (329) | 0.141 | 1.55 | 0.098 | 0.0074 | ND |
| PAOD (577)^{c} | 0.122 | 1.31 | 0.056 | 0.061 | ND |
| Males (356) | 0.126 | 1.36 | 0.065 | 0.057 | ND |
| Females (221) | 0.114 | 1.22 | 0.041 | 0.31 | ND |
| ^{a}P value adjusted for the number of haplotypes tested. | | | | | |
| ^{b}Not done. | | | | | |
| ^{c}Excluding known cases of MI. Shown is the FLAP A4 haplotype and corresponding number of patients (n), haplotype frequency in patients (Frq. pat.), relative risk (RR), population attributed risk (PAR) and P values. | | | | | |
| # The A4 haplotype is defined by the following SNPs: SG13S25, SG13S114, SG13S89 and SG13S32 (Table 5). The same controls (n = 628) are used for the association analysis in MI, stroke and PAOD as well as for the male, female and early onset analysis. | | | | | |
| # The A4 haplotype frequency in the control cohort is 0.095. | | | | | |

[0324] The relative risk conferred by The A4 haplotype compared to other haplotypes constructed out of the same SNPs, assuming a multiplicative model, was 1.8 and the corresponding population attributable risk (PAR) was 13.5%. As shown in Table 6, the A4 haplotype was observed in higher frequency in male patients (carrier frequency 30.9%) than in female patients (carrier frequency 25.7%). All the other haplotypes that were significantly associated with an adjusted P value less than 0.05, were highly correlated with the A4 haplotype and should be considered variants of that haplotype (Table 5). Table 6 shows the results of the haplotype A4 association study using 779 MI patients, 702 stroke patients, 577 PAOD patients and 628 controls. First and second degree relatives were excluded from the patient cohorts. All known cases of MI were removed from the stroke and PAOD cohorts before testing for association. A significant association of the A4 haplotype to stroke was observed, with a relative risk of 1.67 (P value=0.000095). In addition, it was determined whether the A4 haplotype was primarily associated with a particular sub-phenotype of stroke, and found that both ischemic and hemorrhagic stroke were significantly associated with the A4 haplotype (Table 22, below).

[0325] More Variants of Haplotype A4

[0326] Two correlated series of SNP haplotypes were observed in excess in patients, denoted as A and B in Table 7. The length of the haplotypes varies between 33 and 69 Kb, and the haplotypes cover one or two blocks of linkage disequilibrium. Both series of haplotypes contain the common allele G of the SNP SG13S25. All haplotypes in the A series contain the SNP SG13S114, while all haplotypes in the B series contain the SNP SG13S106. In the B series, the haplotypes B4, B5, and B6 have a relative risk (RR) greater than 2 and with allelic frequencies above 10%. The haplotypes in A series have slightly lower RR and lower p-values, but higher frequency (15-16%). The haplotypes in series B and A are strongly correlated, i.e. the haplotypes in B define a subset of the haplotypes in A. Hence, haplotypes B are more specific than A. Haplotypes A are however more sensitive, i.e. they capture more individuals with the putative mutation, as is observed in the population attributable risk which is less for B than for A. Furthermore, these haplotypes show similar risk ratios and allelic frequency for early-onset patients (defined as onset of first MI before the age of 55) and for both gender. In addition, analyzing various groups of patients with known risk factors, such as hypertension, high cholesterol, smoking and diabetes, did not reveal any significant correlation with these haplotypes, indicating that the haplotypes in the FLAP gene represent an independent genetic susceptibility factor for MI.

TABLE 7
The selected SNP haplotypes and the corresponding p-values

| | p-val | RR | #aff | aff.frq. | carr.frq. | #con | con.frq. | PAR | SG13S99 | SG13S25 | SG13S377 |
|---|---|---|---|---|---|---|---|---|---|---|---|
| B4 | 4.80E−05 | 2.08 | 903 | 0.106 | 0.2 | 619 | 0.054 | 0.11 | | G | |
| B5 | 2.40E−05 | 2.2 | 910 | 0.101 | 0.19 | 623 | 0.049 | 0.11 | T | G | |
| B6 | 1.80E−06 | 2.22 | 913 | 0.131 | 0.24 | 623 | 0.063 | 0.14 | T | G | G |
| A4 | 5.10E−06 | 1.81 | 919 | 0.159 | 0.29 | 623 | 0.095 | 0.14 | | G | |
| A5 | 2.60E−06 | 1.91 | 920 | 0.15 | 0.28 | 624 | 0.085 | 0.14 | T | G | |

| | SG13S106 | SG13S114 | SG13S89 | SG13S30 | SG13S32 | SG13S42 | SG13S35 |
|---|---|---|---|---|---|---|---|
| B4 | G | | | G | | A | |
| B5 | G | | | G | | A | |
| B6 | G | | | | A | | G |
| A4 | | T | G | | A | | |
| A5 | | T | G | | A | | |

Relative risk (RR),
number of patients (#aff),
allelic frequency in patients (aff.frq.),
carrier frequency in patients (carr.frq.),
number of controls (#con),
allelic frequency in controls (con.frq.),
population attributable risk (PAR).
The patients used for this analysis were all unrelated within 4 meioses.

[0327] Haplotype Association to Female MI

[0328] Before we had typed all the SNPs that eventually lead to the identification of A4 haplotype we performed a haplotype association analysis that included 437 female MI patients, 1049 male MI patients, and 811 controls that had been genotyped with several SNPs and 3 microsatellite markers. These markers were all located within 300 kb region encompassing the FLAP gene. In a case-control study of the MI patients using these data, several haplotypes were found, that were significantly over-represented in the female MI patients compared to controls (see Table 8). All these haplotypes were highly correlated with each other.

TABLE 8
haplotypes in the FLAP region (FLAP and flanking nucleotide
sequences) that were associated with female MI.

| SG13S421 | SG13S418 | SG13S419 | SG13S420 | DG13S166 | SG13S106 | SG13S114 | SG13S121 | SG13S122 | SG13S88 | SG13S181 |
|---|---|---|---|---|---|---|---|---|---|---|
| | C | | T | 0 | | | | | | |
| | C | | T | 0 | | T | | A | T | |
| | C | | T | 0 | | T | | | T | |
| | C | | T | 0 | | T | G | | T | |
| | C | | T | 0 | | T | | | T | |
| | C | A | T | 0 | | T | | | T | |
| | C | | T | 0 | | T | | A | T | |
| | C | | T | 0 | | T | | | T | G |
| | C | | T | 0 | | | G | | T | |
| | C | | T | 0 | | | G | | T | |
| | C | | T | 0 | G | | | | T | |
| | C | | T | 0 | | | | A | T | |
| | C | | T | 0 | | | | A | T | |
| | C | | T | 0 | | | G | A | T | |
| A | C | | T | 0 | | | G | | T | |
| A | C | | T | 0 | | | | | T | |
| A | C | | T | 0 | | T | | | T | |
| | C | A | T | 0 | | | G | | T | |
| A | C | | T | 0 | | | | A | T | |
| A | C | A | T | 0 | | | | | T | |

| SG13S184 | D13S1238 | DG13S2605 | p-val | N_aff | aff.frq | N_ctrl | ctrl.frq | rel_risk | PAR | info |
|---|---|---|---|---|---|---|---|---|---|---|
| G | −2 | | 1.30E−05 | 455 | 0.108 | 811 | 0.048 | 2.4 | 0.122 | 0.615 |
| | −2 | 0 | 7.61E−06 | 455 | 0.065 | 812 | 0.02 | 3.45 | 0.091 | 0.615 |
| | −2 | 0 | 8.82E−06 | 455 | 0.065 | 812 | 0.02 | 3.47 | 0.092 | 0.602 |
| | −2 | 0 | 9.31E−06 | 455 | 0.065 | 812 | 0.02 | 3.39 | 0.089 | 0.611 |
| G | −2 | 0 | 6.91E−06 | 455 | 0.063 | 812 | 0.019 | 3.54 | 0.09 | 0.624 |
| | −2 | 0 | 9.76E−06 | 455 | 0.063 | 812 | 0.019 | 3.51 | 0.089 | 0.606 |
| G | −2 | | 1.09E−05 | 455 | 0.063 | 811 | 0.019 | 3.41 | 0.086 | 0.618 |
| | −2 | 0 | 1.10E−05 | 455 | 0.063 | 812 | 0.019 | 3.44 | 0.087 | 0.611 |
| G | −2 | 0 | 1.11E−05 | 455 | 0.063 | 812 | 0.018 | 3.56 | 0.086 | 0.589 |
| G | −2 | | 1.22E−05 | 455 | 0.063 | 811 | 0.018 | 3.6 | 0.087 | 0.577 |
| G | −2 | 0 | 1.26E−05 | 455 | 0.063 | 812 | 0.02 | 3.35 | 0.088 | 0.629 |
| G | −2 | 0 | 8.59E−06 | 455 | 0.062 | 812 | 0.018 | 3.53 | 0.085 | 0.62 |
| G | −2 | | 1.20E−05 | 455 | 0.062 | 811 | 0.019 | 3.42 | 0.086 | 0.617 |
| G | −2 | | 1.21E−05 | 455 | 0.062 | 811 | 0.019 | 3.43 | 0.086 | 0.619 |
| G | −2 | | 7.93E−06 | 455 | 0.061 | 811 | 0.016 | 3.95 | 0.088 | 0.562 |
| G | −2 | | 1.09E−05 | 455 | 0.061 | 811 | 0.017 | 3.85 | 0.09 | 0.56 |
| G | −2 | | 5.00E−06 | 455 | 0.06 | 811 | 0.015 | 4.11 | 0.087 | 0.576 |
| G | −2 | | 1.31E−05 | 455 | 0.06 | 811 | 0.017 | 3.66 | 0.085 | 0.586 |
| G | −2 | | 8.53E−06 | 455 | 0.059 | 811 | 0.016 | 3.85 | 0.085 | 0.593 |
| G | −2 | | 9.63E−06 | 455 | 0.058 | 811 | 0.015 | 4.03 | 0.085 | 0.565 |

[0329] Table 9 shows two haplotypes that are representative of these female MI risk haplotypes. The relative risk of these haplotypes were 2.4 and 4, and they were carried by 23% and 13% of female MI patients, respectively.

TABLE 9
Two representative variants of the female MI “at risk” haplotypes

| | SG13S418 | SG13S420 | DG13S166 | SG13S114 | SG13S88 | SG13S184 | D13S1238 |
|---|---|---|---|---|---|---|---|
| Female MI | C | T | 0 | T | T | G | −2 |
| | C | T | 0 | | | G | −2 |

| | p-val | N_aff | aff.frq | N_ctrl | ctrl.frq | rel_risk | PAR | info |
|---|---|---|---|---|---|---|---|---|
| Female MI | 6.38E−06 | 454 | 0.059 | 809 | 0.015 | 4.05 | 0.086 | 0.577 |
| | 2.74E−05 | 447 | 0.106 | 809 | 0.048 | 2.33 | 0.116 | 0.623 |

p-val: p-value for the association.
N_aff: Number of patients used in the analysis.
aff. frq: haplotype frequency in patients.
N_ctrl: number of controls used in the analysis.
ctrl.frq: Haplotype frequency in controls.
rel_risk: Relative risk of the haplotype.
PAR: population attributable risk.
info: information content.

[0330] Table 10 shows that these same haplotypes were also over-represented in male MI patients compared to controls, although with lower relative risk. It should be noted that after typing and analysing more SNPs in the FLAP region these female MI “at risk” haplotypes could no longer be considered significant after adjusting for multiple testing.

TABLE 10
The frequencies of the female MI “at risk” haplotypes in male patients vs controls.

| | SG13S418 | SG13S420 | DG13S166 | SG13S114 | SG13S88 | SG13S184 | D13S1238 |
|---|---|---|---|---|---|---|---|
| Male MI | C | T | 0 | T | T | G | −2 |
| | C | T | 0 | | | G | −2 |

| | p-val | N_aff | aff.frq | N_ctrl | ctrl.frq | rel_risk | PAR | Info |
|---|---|---|---|---|---|---|---|---|
| Male MI | 3.37E−01 | 1087 | 0.027 | 809 | 0.021 | 1.32 | 0.013 | 0.577 |
| | 5.39E−01 | 1087 | 0.056 | 809 | 0.05 | 1.13 | 0.013 | 0.568 |

p-val: p-value for the association.
N_aff: Number of patients used in the analysis.
aff.frq: haplotype frequency in patients.
N_ctrl: number of controls used in the analysis.
ctrl.frq: Haplotype frequency in controls.
rel_risk: Relative risk of the haplotype.
PAR: population attributable risk.
Info: information content.

[0331] TABLE 11
The marker map for chromosome 13 used in the linkage analysis.

| Location (cM) | Marker |
|---|---|
| 6 | D13S175 |
| 9.8 | D13S1243 |
| 13.5 | D13S1304 |
| 17.2 | D13S217 |
| 21.5 | D13S289 |
| 25.1 | D13S171 |
| 28.9 | D13S219 |
| 32.9 | D13S218 |
| 38.3 | D13S263 |
| 42.8 | D13S326 |
| 45.6 | D13S153 |
| 49.4 | D13S1320 |
| 52.6 | D13S1296 |
| 55.9 | D13S156 |
| 59.8 | D13S1306 |
| 63.9 | D13S170 |
| 68.7 | D13S265 |
| 73 | D13S167 |
| 76.3 | D13S1241 |
| 79.5 | D13S1298 |
| 81.6 | D13S1267 |
| 84.7 | D13S1256 |
| 85.1 | D13S158 |
| 87 | D13S274 |
| 93.5 | D13S173 |
| 96.7 | D13S778 |
| 102.7 | D13S1315 |
| 110.6 | D13S285 |
| 115 | D13S293 |

[0332] TABLE 12
Marker Map for the second step of Linkage Analysis

| Location (cM) | Marker |
|---|---|
| 1.758 | D13S175 |
| 9.235 | D13S787 |
| 11.565 | D13S1243 |
| 16.898 | D13S221 |
| 17.454 | D13S1304 |
| 18.011 | D13S1254 |
| 18.59 | D13S625 |
| 19.308 | D13S1244 |
| 19.768 | D13S243 |
| 22.234 | D13S1250 |
| 22.642 | D13S1242 |
| 22.879 | D13S217 |
| 25.013 | D13S1299 |
| 28.136 | D13S289 |
| 28.678 | D13S290 |
| 29.134 | D13S1287 |
| 30.073 | D13S260 |
| 31.98 | D13S171 |
| 32.859 | D13S267 |
| 33.069 | D13S1293 |
| 33.07 | D13S620 |
| 34.131 | D13S220 |
| 36.427 | D13S219 |
| 39.458 | D13S1808 |
| 40.441 | D13S218 |
| 41.113 | D13S1288 |
| 41.996 | D13S1253 |
| 42.585 | D13S1248 |
| 44.288 | D13S1233 |
| 44.377 | D13S263 |
| 45.535 | D13S325 |
| 45.536 | D13S1270 |
| 45.537 | D13S1276 |
| 49.149 | D13S326 |
| 49.532 | D13S1272 |
| 52.421 | D13S168 |
| 52.674 | D13S287 |
| 60.536 | D13S1320 |
| 64.272 | D13S1296 |
| 71.287 | D13S156 |
| 76.828 | D13S1306 |
| 77.86 | D13S170 |
| 82.828 | D13S265 |
| 91.199 | D13S1241 |
| 93.863 | D13S1298 |
| 97.735 | D13S779 |
| 100.547 | D13S1256 |
| 102.277 | D13S274 |
| 111.885 | D13S173 |
| 112.198 | D13S796 |
| 115.619 | D13S778 |
| 119.036 | D13S1315 |
| 126.898 | D13S285 |
| 131.962 | D13S293 |

[0333] Table 13 shows the exons with positions that encode the FLAP protein, markers, polymorphisms and SNPs identified within the genomic sequence by the methods described herein.

| | | | | | | | | | start | end |
|---|---|---|---|---|---|---|---|---|---|---|
| NCBI | NCBI | | | | | | | minor | position | position |
| build34; | build34; | | | | | | | allele | in | in |
| start on chr. | stop on chr. | SNP/marker/ | | | public | Vari- | minor | frequency | SEQ ID | SEQ ID |
| 13 (bp) | 13 (bp) | exon name | alias1 | alias2 | SNP | ation | allele | (%) | NO: 1 | NO: 1 |
| 28932432 | 28932432 | SG13S421 | | DG00AAFQR | rs1556428 | A/G | G | 10.32 | 432 | 432 |
| 28960356 | 28960356 | SG13S417 | | SNP13B_R1028729 | rs1028729 | C/T | G | 30.46 | 28356 | 28356 |
| 28965803 | 28965803 | SG13S418 | | SNP13B_Y1323898 | rs1323898 | A/G | T | 37.38 | 33803 | 33803 |
| 28974627 | 28974627 | SG13S44 | | | | A/G | G | 0.545 | 42627 | 42627 |
| 28975101 | 28975101 | SG13S45 | | | | C/G | G | 1.111 | 43101 | 43101 |
| 28975315 | 28975315 | SG13S46 | | | | A/G | G | 0.328 | 43315 | 43315 |
| 28975353 | 28975353 | SG13S50 | | | | C/T | C | 0.495 | 43353 | 43353 |
| 28975774 | 28975774 | SG13S52 | | | | A/G | A | 6.993 | 43774 | 43774 |
| 28985244 | 28985244 | SG13S53 | | | rs1408167 | A/C | C | 30.876 | 53244 | 53244 |
| 28985303 | 28985303 | SG13S55 | | | rs1408169 | A/G | G | 6.731 | 53303 | 53303 |
| 28985423 | 28985423 | SG13S56 | | | | G/T | T | 0.353 | 53423 | 53423 |
| 28985734 | 28985734 | SG13S57 | | | rs6490471 | C/T | C | 31.356 | 53734 | 53734 |
| 28985902 | 28985902 | SG13S58 | | | rs6490472 | A/G | A | 30.935 | 53902 | 53902 |
| 29003869 | 29003869 | SG13S59 | | | | C/G | G | 5.492 | 71869 | 71869 |
| 29004696 | 29004696 | SG13S60 | | | | A/G | A | 1.812 | 72696 | 72696 |
| 29007670 | 29007670 | SG13S419 | | SNP13B_K912392 | rs912392 | C/T | G | 35.00 | 75670 | 75670 |
| 29015410 | 29015410 | SG13S61 | | | | C/T | C | 1.314 | 83410 | 83410 |
| 29025792 | 29025792 | SG13S62 | | | | C/T | T | 3.521 | 93792 | 93792 |
| 29026202 | 29026202 | SG13S63 | | | rs7997114 | A/G | A | 30.031 | 94202 | 94202 |
| 29026668 | 29026668 | SG13S64 | | | | A/G | A | 1.724 | 94668 | 94668 |
| 29038707 | 29038707 | SG13S65 | | | | A/G | A | 0.369 | 106707 | 106707 |
| 29042180 | 29042180 | SG13S420 | | DG00AAFIV | rs2248564 | A/T | A | 13.66 | 110180 | 110180 |
| 29049355 | 29049355 | SG13S66 | | | | A/G | A | 20.779 | 117355 | 117355 |
| 29049446 | 29049446 | SG13S67 | | | | C/T | T | 5.965 | 117446 | 117446 |
| 29050416 | 29050416 | SG13S69 | | | | A/C | A | 16.923 | 118416 | 118416 |
| 29059348 | 29059348 | SG13S70 | | | | A/G | A | 34.364 | 127348 | 127348 |
| 29059383 | 29059383 | SG13S71 | | | | A/G | A | 8.537 | 127383 | 127383 |
| 29059402 | 29059402 | SG13S72 | | | | G/T | T | 25.536 | 127402 | 127402 |
| 29063702 | 29063949 | D13S289 | | | | | | | 131702 | 131949 |
| 29064359 | 29064753 | DG13S166 | | | | | | | 132359 | 132753 |
| 29066272 | 29066272 | SG13S73 | | | | A/G | A | 37.302 | 134272 | 134272 |
| 29070551 | 29070551 | SG13S99 | SNP_13_Y1323892 | DG00AAFIU | rs1323892 | C/T | C | 6.25 | 138551 | 138551 |
| 29081983 | 29081983 | SG13S382 | FLA267479 | | | A/G | A | 0.49 | 149983 | 149983 |
| 29082200 | 29082200 | SG13S383 | FLA267696 | | | A/G | A | 14.08 | 150200 | 150200 |
| 29082357 | 29082357 | SG13S384 | FLA267853 | | | A/G | G | 0.62 | 150357 | 150357 |
| 29083350 | 29083350 | SG13S381 | FLA268846 | DG00AAJER | | C/G | G | 14.01 | 151350 | 151350 |
| 29083518 | 29083518 | SG13S366 | FLA269014 | DG00AAJES | rs4312166 | A/G | T | 0.58 | 151518 | 151518 |
| 29085102 | 29085102 | SG13S385 | FLA270742 | | | C/T | C | 30.21 | 153102 | 153102 |
| 29085190 | 29085190 | SG13S386 | FLA270830 | | | A/G | A | 10.95 | 153190 | 153190 |
| 29086224 | 29086224 | SG13S1 | FLA271864 | | | G/T | G | 30.00 | 154224 | 154224 |
| 29087473 | 29087473 | SG13S2 | FLA273371 | | | A/G | A | 27.95 | 155473 | 155473 |
| 29088090 | 29088090 | SG13S367 | FLA273988 | DG00AAJEU | rs4474551 | A/G | G | 2.41 | 156090 | 156090 |
| 29088186 | 29088186 | SG13S388 | FLA274084 | | | A/G | A | 0.39 | 156186 | 156186 |
| 29088473 | 29088473 | SG13S10 | FLA274371 | | | A/T | T | 10.23 | 156473 | 156473 |
| 29089044 | 29089044 | SG13S3 | FLA274942 | | | C/T | T | 15.17 | 157044 | 157044 |
| 29089886 | 29089886 | SG13S368 | FLA275784 | DG00AAJEV | | C/T | T | 13.60 | 157886 | 157886 |
| 29090025 | 29090025 | SG13S369 | FLA275923 | DG00AAJEW | | G/T | G | 12.44 | 158025 | 158025 |
| 29090054 | 29090054 | SG13S370 | FLA275952 | DG00AAJEX | | A/G | A | 13.45 | 158054 | 158054 |
| 29090997 | 29090997 | SG13S4 | FLA276895 | | | G/C | G | 14.59 | 158997 | 158997 |
| 29091307 | 29091307 | SG13S5 | FLA277205 | | rs4238133 | G/T | T | 26.84 | 159307 | 159307 |
| 29091580 | 29091580 | SG13S389 | FLA277478 | | | A/G | A | 12.73 | 159580 | 159580 |
| 29091780 | 29091780 | SG13S90 | FLA277678 | | | A/C | C | 43.67 | 159780 | 159780 |
| 29092287 | 29092287 | SG13S390 | FLA278185 | | rs5004913 | A/G | A | 12.18 | 160287 | 160287 |
| 29092536 | 29092536 | SG13S6 | FLA278434 | | | A/G | A | 8.38 | 160536 | 160536 |
| 29092594 | 29092594 | SG13S391 | FLA278492 | | | A/G | G | 0.62 | 160594 | 160594 |
| 29092947 | 29092947 | SG13S392 | FLA278845 | | | G/T | T | 12.34 | 160947 | 160947 |
| 29093964 | 29093964 | SG13S371 | FLA279888 | DG00AAJEY | rs4409939 | A/G | G | 25.34 | 161964 | 161964 |
| 29094259 | 29094259 | SG13S372 | FLA280183 | DG00AAJEZ | | A/G | C | 0.24 | 162259 | 162259 |
| 29094999 | 29094999 | SG13S393 | FLA280923 | | | A/T | T | 25.66 | 162999 | 162999 |
| 29096688 | 29096688 | SG13S373 | FLA282612 | DG00AAJFA | | A/G | A | 14.84 | 164688 | 164688 |
| 29096813 | 29096813 | SG13S374 | FLA282737 | DG00AAJFB | | A/G | G | 12.37 | 164813 | 164813 |
| 29096874 | 29096874 | SG13S375 | FLA282798 | DG00AAJFC | | C/T | C | 14.55 | 164874 | 164874 |
| 29096962 | 29096962 | SG13S376 | FLA282886 | DG00AAJFD | | A/G | G | 11.99 | 164962 | 164962 |
| 29097476 | 29097476 | SG13S394 | FLA283400 | | | C/G | C | 14.66 | 165476 | 165476 |
| 29097553 | 29097553 | SG13S25 | FLA283477 | | | A/G | A | 12.21 | 165553 | 165553 |
| 29098486 | 29098486 | SG13S395 | FLA284410 | | | A/G | A | 0.79 | 166486 | 166486 |
| 29098891 | 29098891 | SG13S396 | FLA284815 | | | A/C | C | 10.15 | 166891 | 166891 |
| 29098979 | 29098979 | SG13S397 | FLA284903 | | | C/T | C | 3.53 | 166979 | 166979 |
| 29101965 | 29101965 | SG13S377 | FLA287889 | DG00AAJFF | | A/G | A | 12.45 | 169965 | 169965 |
| 29103909 | 29103909 | SG13S189 | FLA289833 | | | C/G | C | 0.62 | 171909 | 171909 |
| 29104271 | 29104271 | SG13S100 | FLA290195 | DG00AAHIK | rs4073259 | A/G | G | 31.55 | 172271 | 172271 |
| 29104629 | 29104629 | SG13S398 | FLA290553 | | | C/G | G | 4.94 | 172629 | 172629 |
| 29104646 | 29104646 | SG13S94 | FLA290570 | | rs4073261 | C/T | C | 15.51 | 172646 | 172646 |
| 29105099 | 29105099 | SG13S101 | FLA291023 | | rs4075474 | C/T | T | 27.91 | 173099 | 173099 |
| 29106329 | 29106329 | SG13S95 | FLA292253 | | | G/T | G | 14.74 | 174329 | 174329 |
| 29106652 | 29106652 | SG13S102 | FLA292576 | | | A/T | T | 1.17 | 174652 | 174652 |
| 29107138 | 29107138 | SG13S103 | FLA293062 | | | C/T | T | 1.28 | 175138 | 175138 |
| 29107404 | 29107404 | SG13S104 | FLA293328 | | | A/G | A | 2.17 | 175404 | 175404 |
| 29107668 | 29107812 | EXON1 | | | | | | | 175668 | 175812 |
| 29107830 | 29107830 | SG13S191 | FLA293754 | DG00AAFJT | rs4769055 | A/C | A | 30.11 | 175830 | 175830 |
| 29108398 | 29108398 | SG13S105 | FLA294322 | | | A/G | G | 0.66 | 176398 | 176398 |
| 29108579 | 29108579 | SG13S106 | FLA294503 | DG00AAHII | | A/G | A | 28.31 | 176579 | 176579 |
| 29108919 | 29108919 | SG13S107 | FLA294843 | | rs4075131 | A/G | G | 14.85 | 176919 | 176919 |
| 29108972 | 29108972 | SG13S108 | FLA294896 | | rs4075132 | C/T | C | 1.21 | 176972 | 176972 |
| 29109112 | 29109112 | SG13S109 | FLA295036 | | | A/G | A | 1.04 | 177112 | 177112 |
| 29109182 | 29109182 | SG13S110 | FLA295106 | | | A/G | G | 0.88 | 177182 | 177182 |
| 29109344 | 29109344 | SG13S111 | FLA295268 | | rs4597169 | C/T | C | 1.14 | 177344 | 177344 |
| 29109557 | 29109557 | SG13S112 | FLA295481 | | | C/T | T | 7.10 | 177557 | 177557 |
| 29109773 | 29109773 | SG13S113 | FLA295697 | | rs4293222 | C/G | C | 22.52 | 177773 | 177773 |
| 29110096 | 29110096 | SG13S114 | FLA296020 | DG00AAHID | | A/T | A | 20.86 | 178096 | 178096 |
| 29110178 | 29110178 | SG13S115 | FLA296102 | | | A/T | T | 13.83 | 178178 | 178178 |
| 29110508 | 29110508 | SG13S116 | FLA296432 | | rs4769871 | C/T | T | 4.05 | 178508 | 178508 |
| 29110630 | 29110630 | SG13S117 | FLA296554 | | rs4769872 | A/G | A | 4.07 | 178630 | 178630 |
| 29110689 | 29110689 | SG13S118 | FLA296613 | | rs4769873 | C/T | T | 4.07 | 178689 | 178689 |
| 29110862 | 29110862 | SG13S119 | FLA296786 | | | A/G | A | 1.06 | 178862 | 178862 |
| 29111889 | 29111889 | SG13S120 | FLA297813 | | | C/T | C | 16.00 | 179889 | 179889 |
| 29112174 | 29112174 | SG13S121 | FLA298098 | DG00AAHIJ | rs4503649 | A/G | G | 49.36 | 180174 | 180174 |
| 29112264 | 29112264 | SG13S122 | FLA298188 | DG00AAHIH | | A/G | A | 29.75 | 180264 | 180264 |
| 29112306 | 29112306 | SG13S123 | FLA298230 | | | C/T | T | 5.06 | 180306 | 180306 |
| 29112455 | 29112455 | SG13S43 | FLA298379 | | rs3885907 | A/C | C | 46.23 | 180455 | 180455 |
| 29112583 | 29112583 | SG13S399 | FLA298507 | | | A/C | C | 1.59 | 180583 | 180583 |
| 29112680 | 29112680 | SG13S124 | FLA298604 | | rs3922435 | C/T | T | 1.45 | 180680 | 180680 |
| 29113139 | 29113139 | SG13S125 | FLA299063 | | | A/G | G | 11.32 | 181139 | 181139 |
| 29114056 | 29114056 | SG13S400 | FLA299980 | | | A/G | A | 3.25 | 182056 | 182056 |
| 29114738 | 29114738 | SG13S126 | FLA300662 | | | A/G | A | 34.12 | 182738 | 182738 |
| 29114940 | 29114940 | SG13S127 | FLA300864 | | | A/G | G | 29.63 | 182940 | 182940 |
| 29115878 | 29115878 | SG13S128 | FLA302094 | | rs4254165 | A/G | A | 45.68 | 183878 | 183878 |
| 29116020 | 29116020 | SG13S129 | FLA302236 | | rs4360791 | A/G | G | 36.65 | 184020 | 184020 |
| 29116068 | 29116068 | SG13S130 | FLA302284 | | | G/T | G | 8.07 | 184068 | 184068 |
| 29116196 | 29116296 | EXON2 | | | | | | | 184196 | 184296 |
| 29116249 | 29116249 | SG13S190 | FLA302465 | | | C/T | T | 1.02 | 184249 | 184249 |
| 29116308 | 29116308 | SG13S192 | FLA302524 | B_SNP_302524 | rs3803277 | A/C | A | 49.57 | 184308 | 184308 |
| 29116344 | 29116344 | SG13S193 | FLA302560 | | | A/G | A | 0.58 | 184344 | 184344 |
| 29116401 | 29116401 | SG13S88 | FLA302617 | B_SNP_302617 | rs3803278 | C/T | C | 24.71 | 184401 | 184401 |
| 29116688 | 29116688 | SG13S131 | FLA302904 | | | C/T | T | 7.19 | 184688 | 184688 |
| 29117133 | 29117133 | SG13S132 | FLA303349 | | | A/C | A | 1.10 | 185133 | 185133 |
| 29117546 | 29117546 | SG13S133 | FLA303762 | | rs4356336 | C/T | T | 37.65 | 185546 | 185546 |
| 29117553 | 29117553 | SG13S38 | FLA303769 | | rs4584668 | A/T | A | 45.50 | 185553 | 185553 |
| 29117580 | 29117580 | SG13S134 | FLA303796 | | | C/T | T | 1.22 | 185580 | 185580 |
| 29117741 | 29117741 | SG13S135 | FLA303957 | | rs4238137 | C/T | T | 0.89 | 185741 | 185741 |
| 29117954 | 29117954 | SG13S136 | FLA304170 | | rs4147063 | C/T | T | 36.69 | 185954 | 185954 |
| 29118118 | 29118118 | SG13S137 | FLA304334 | DG00AAHIG | rs4147064 | C/T | T | 29.11 | 186118 | 186118 |
| 29118815 | 29118815 | SG13S86 | FLA305031 | | | A/G | A | 30.19 | 186815 | 186815 |
| 29118873 | 29118873 | SG13S87 | FLA305089 | DG00AAHOJ | | A/G | G | 3.29 | 186873 | 186873 |
| 29119069 | 29119069 | SG13S138 | FLA305285 | | | C/T | T | 36.96 | 187069 | 187069 |
| 29119138 | 29119138 | SG13S139 | FLA305354 | | | C/G | G | 36.63 | 187138 | 187138 |
| 29119289 | 29119289 | SG13S140 | FLA305505 | | | A/G/T | T | 37.34 | 187289 | 187289 |
| 29119462 | 29119462 | SG13S141 | FLA305678 | | | C/T | C | 1.15 | 187462 | 187462 |
| 29119740 | 29119740 | SG13S39 | FLA305956 | | | G/T | T | 9.91 | 187740 | 187740 |
| 29120939 | 29120939 | SG13S142 | FLA307155 | | rs4387455 | C/T | C | 3.36 | 188939 | 188939 |
| 29120949 | 29120949 | SG13S143 | FLA307165 | | rs4254166 | C/T | T | 36.24 | 188949 | 188949 |
| 29121342 | 29121342 | SG13S144 | FLA307558 | | rs4075692 | A/G | A | 31.58 | 189342 | 189342 |
| 29121572 | 29121572 | SG13S145 | FLA307788 | | | C/G | G | 0.45 | 189572 | 189572 |
| 29121988 | 29121988 | SG13S146 | FLA308204 | | | C/T | T | 1.14 | 189988 | 189988 |
| 29122253 | 29122253 | SG13S26 | FLA308469 | | | C/T | T | 46.57 | 190253 | 190253 |
| 29122283 | 29122283 | SG13S27 | FLA308499 | | | A/G | A | 10.34 | 190283 | 190283 |
| 29122294 | 29122294 | SG13S147 | FLA308510 | | | C/T | T | 8.00 | 190294 | 190294 |
| 29122298 | 29122298 | SG13S28 | FLA308514 | | | G/T | T | 33.71 | 190298 | 190298 |
| 29122311 | 29122311 | SG13S148 | FLA308527 | | | G/T | T | 2.29 | 190311 | 190311 |
| 29123370 | 29123370 | SG13S98 | FLA309586 | | | G/T | G | 1.19 | 191370 | 191370 |
| 29123635 | 29123635 | SG13S149 | FLA309851 | | | A/G | A | 1.01 | 191635 | 191635 |
| 29123643 | 29123643 | SG13S29 | FLA309859 | | | A/C | A | 47.88 | 191643 | 191643 |
| 29124188 | 29124259 | EXON3 | | | | | | | 192188 | 192259 |
| 29124441 | 29124441 | SG13S89 | FLA310657 | B_SNP_310657 | rs4769874 | A/G | A | 4.68 | 192441 | 192441 |
| 29124906 | 29124906 | SG13S96 | FLA311122 | | rs4072653 | A/G | G | 29.72 | 192906 | 192906 |
| 29125032 | 29125032 | SG13S150 | FLA311248 | | | C/G | C | 8.22 | 193032 | 193032 |
| 29125521 | 29125521 | SG13S401 | FLA311737 | | | C/T | C | 21.10 | 193521 | 193521 |
| 29125822 | 29125822 | SG13S151 | FLA312038 | | | C/T | T | 8.57 | 193822 | 193822 |
| 29125840 | 29125840 | SG13S30 | FLA312056 | | | G/T | T | 23.23 | 193840 | 193840 |
| 29127301 | 29127301 | SG13S31 | FLA313550 | | | C/T | T | 24.20 | 195301 | 195301 |
| 29128080 | 29128162 | EXON4 | | | | | | | 196080 | 196162 |
| 29128284 | 29128284 | SG13S152 | FLA314500 | | | C/G | C | 23.89 | 196284 | 196284 |
| 29128316 | 29128316 | SG13S402 | FLA314532 | | rs4468448 | C/T | T | 19.33 | 196316 | 196316 |
| 29128798 | 29128798 | SG13S403 | FLA315014 | | rs4399410 | A/G | G | 11.50 | 196798 | 196798 |
| 29129016 | 29129016 | SG13S153 | FLA315232 | | | A/T | T | 3.08 | 197016 | 197016 |
| 29129139 | 29129139 | SG13S97 | FLA315355 | | | A/G | A | 9.72 | 197139 | 197139 |
| 29129154 | 29129154 | SG13S154 | FLA315370 | | | C/T | T | 0.98 | 197154 | 197154 |
| 29129395 | 29129395 | SG13S40 | FLA315611 | | | G/T | T | 2.24 | 197395 | 197395 |
| 29129915 | 29129915 | SG13S155 | FLA316131 | | rs4769875 | A/G | A | 1.43 | 197915 | 197915 |
| 29130192 | 29130192 | SG13S156 | FLA316408 | | | A/C | A | 1.80 | 198192 | 198192 |
| 29130256 | 29130256 | SG13S157 | FLA316472 | | | A/G | G | 2.38 | 198256 | 198256 |
| 29130299 | 29130299 | SG13S158 | FLA316515 | | | A/C | A | 0.61 | 198299 | 198299 |
| 29130353 | 29130353 | SG13S159 | FLA316569 | | | G/T | G | 2.55 | 198353 | 198353 |
| 29130391 | 29130391 | SG13S160 | FLA316607 | | | C/T | T | 0.83 | 198391 | 198391 |
| 29130547 | 29130547 | SG13S32 | FLA316763 | | | A/C | C | 48.50 | 198547 | 198547 |
| 29131280 | 29131280 | SG13S161 | FLA317496 | | | A/G | G | 2.44 | 199280 | 199280 |
| 29131403 | 29131403 | SG13S162 | FLA317619 | | | A/G | G | 2.45 | 199403 | 199403 |
| 29131404 | 29131404 | SG13S163 | FLA317620 | | | C/T | C | 2.45 | 199404 | 199404 |
| 29131431 | 29131431 | SG13S164 | FLA317647 | | rs4769058 | C/T | C | 2.55 | 199431 | 199431 |
| 29131517 | 29131517 | SG13S165 | FLA317733 | | | A/T | T | 20.00 | 199517 | 199517 |
| 29131528 | 29131528 | SG13S166 | FLA317744 | | rs4769059 | C/T | T | 2.46 | 199528 | 199528 |
| 29131599 | 29131599 | SG13S167 | FLA317815 | | rs4769876 | A/G | A | 3.50 | 199599 | 199599 |
| 29132003 | 29132003 | SG13S168 | FLA318219 | | | A/C | C | 8.39 | 200003 | 200003 |
| 29133753 | 29133753 | SG13S33 | FLA319969 | | | G/T | T | 8.99 | 201753 | 201753 |
| 29134045 | 29134045 | SG13S41 | FLA320261 | | | A/G | G | 5.41 | 202045 | 202045 |
| 29134177 | 29134177 | SG13S169 | FLA320393 | | | A/G | G | 4.12 | 202177 | 202177 |
| 29134379 | 29134379 | SG13S404 | FLA320595 | | rs4427651 | G/T | G | 38.33 | 202379 | 202379 |
| 29135558 | 29135558 | SG13S170 | FLA321774 | | rs3935645 | C/T | C | 32.77 | 203558 | 203558 |
| 29135640 | 29135640 | SG13S171 | FLA321856 | | rs3935644 | A/G | G | 48.03 | 203640 | 203640 |
| 29135750 | 29135750 | SG13S172 | FLA321966 | | | A/G | G | 1.67 | 203750 | 203750 |
| 29135809 | 29135809 | SG13S173 | FLA322025 | | | A/T | A | 0.68 | 203809 | 203809 |
| 29135877 | 29135877 | SG13S42 | FLA322093 | | rs4769060 | A/G | G | 42.44 | 203877 | 203877 |
| 29136080 | 29136556 | EXON5 | | | | | | | 204080 | 204556 |
| 29136290 | 29136290 | SG13S194 | FLA322506 | | | C/T | T | 0.30 | 204290 | 204290 |
| 29136462 | 29136462 | SG13S195 | FLA322678 | | rs1132340 | A/G | G | 2.46 | 204462 | 204462 |
| 29136797 | 29136797 | SG13S174 | FLA323013 | | | A/G | G | 0.56 | 204797 | 204797 |
| 29137100 | 29137100 | SG13S34 | FLA323316 | | | G/T | G | 30.23 | 205100 | 205100 |
| 29137150 | 29137150 | SG13S175 | FLA323366 | | | A/G | A | 2.40 | 205150 | 205150 |
| 29137607 | 29137607 | SG13S176 | FLA323823 | | | A/G | A | 2.24 | 205607 | 205607 |
| 29137651 | 29137651 | SG13S177 | FLA323867 | | | C/T | T | 1.64 | 205651 | 205651 |
| 29137905 | 29137905 | SG13S178 | FLA324121 | | | C/G | C | 1.40 | 205905 | 205905 |
| 29138117 | 29138117 | SG13S35 | FLA324333 | | | A/G | A | 9.52 | 206117 | 206117 |
| 29138375 | 29138375 | SG13S179 | FLA324591 | | | A/G | A | 48.14 | 206375 | 206375 |
| 29138385 | 29138385 | SG13S180 | FLA324601 | | | C/T | T | 2.50 | 206385 | 206385 |
| 29138633 | 29138633 | SG13S181 | FLA324849 | DG00AAHIF | rs4420371 | C/G | C | 49.41 | 206633 | 206633 |
| 29139153 | 29139153 | SG13S182 | FLA325369 | | | C/T | T | 2.36 | 207153 | 207153 |
| 29139277 | 29139277 | SG13S183 | FLA325493 | | rs4466940 | C/T | T | 12.07 | 207277 | 207277 |
| 29139435 | 29139435 | SG13S184 | FLA325651 | DG00AAHOI | rs4445746 | A/G | A | 16.67 | 207435 | 207435 |
| 29139971 | 29139971 | SG13S185 | FLA326187 | | | A/G | G | 7.66 | 207971 | 207971 |
| 29140441 | 29140441 | SG13S405 | FLA326657 | | | A/G | A | 9.66 | 208441 | 208441 |
| 29140649 | 29140649 | SG13S91 | FLA326865 | | | A/G | A | 7.78 | 208649 | 208649 |
| 29140695 | 29140695 | SG13S186 | FLA326911 | | rs4769877 | A/T | A | 25.71 | 208695 | 208695 |
| 29140703 | 29140703 | SG13S187 | FLA326919 | | | A/G | A | 1.43 | 208703 | 208703 |
| 29140805 | 29140805 | SG13S188 | FLA327021 | DG00AAJFE | | A/G | G | 4.71 | 208805 | 208805 |
| 29141049 | 29141049 | SG13S406 | FLA327265 | | | C/T | T | 0.56 | 209049 | 209049 |
| 29142392 | 29142392 | SG13S92 | FLA328644 | | rs4429158 | C/T | T | 8.33 | 210392 | 210392 |
| 29142397 | 29142397 | SG13S93 | FLA328649 | | | A/G | A | 7.23 | 210397 | 210397 |
| 29142712 | 29142712 | SG13S36 | FLA328964 | | | C/T | C | 15.88 | 210712 | 210712 |
| 29144013 | 29144013 | SG13S407 | FLA330265 | | | C/T | T | 3.29 | 212013 | 212013 |
| 29144203 | 29144203 | SG13S408 | FLA330455 | | | C/T | T | 0.30 | 212203 | 212203 |
| 29144234 | 29144589 | D13S1238 | | | | | | | 212234 | 212589 |
| 29144255 | 29144255 | SG13S7 | FLA330507 | | | C/T | T | 16.28 | 212255 | 212255 |
| 29144877 | 29144877 | SG13S37 | FLA331129 | | | A/G | G | 16.70 | 212877 | 212877 |
| 29144982 | 29144982 | SG13S409 | FLA331234 | | | A/G | A | 1.93 | 212982 | 212982 |
| 29144983 | 29144983 | SG13S8 | FLA331235 | | rs4491352 | A/C | C | 30.64 | 212983 | 212983 |
| 29145122 | 29145122 | SG13S410 | FLA331374 | | rs4319601 | C/T | T | 20.57 | 213122 | 213122 |
| 29145143 | 29145143 | SG13S411 | FLA331395 | | | A/G | A | 1.54 | 213143 | 213143 |
| 29145171 | 29145171 | SG13S9 | FLA331423 | | | C/T | C | 16.37 | 213171 | 213171 |
| 29145221 | 29145221 | SG13S412 | FLA331473 | | rs4769062 | A/G | A | 7.42 | 213221 | 213221 |
| 29145265 | 29145265 | SG13S413 | FLA331517 | | rs4238138 | C/T | T | 1.91 | 213265 | 213265 |

[0334] TABLE 14
Extended 4 microsatellite marker haplotypes

| 4 | | | | | | | | | | | | | |
|---|---|---|---|---|---|---|---|---|---|---|---|---|---|
| markers | : | pos.rr-frqgt1perc | | | | | | | | | | | |
| Length | p-val | RR | N_af | P_al | P_ca | N_ct | P_al | P_ca | Alleles | | | | Markers |
| 0.88 | 4.71E−06 | 6.23 | 428 | 0.065 | 0.125 | 721 | 0.011 | 0.022 | 0 | −12 | −6 | 0 | DG13S80 |
| | | | | | | | | | | | | | DG13S83 |
| | | | | | | | | | | | | | DG13S1110 |
| | | | | | | | | | | | | | DG13S163 |
| 0.82 | 8.60E−06 | INF | 438 | 0.032 | 0.062 | 720 | 0 | 0 | 0 | 4 | 2 | 14 | DG13S1111 |
| | | | | | | | | | | | | | DG13S1103 |
| | | | | | | | | | | | | | D13S1287 |
| | | | | | | | | | | | | | DG13S1061 |
| 0.67 | 6.98E−06 | 19.91 | 435 | 0.03 | 0.059 | 721 | 0.002 | 0.003 | 8 | 6 | 0 | 8 | DG13S1103 |
| | | | | | | | | | | | | | DG13S163 |
| | | | | | | | | | | | | | D13S290 |
| | | | | | | | | | | | | | DG13S1061 |
| 0.767 | 4.85E−06 | 26.72 | 436 | 0.048 | 0.094 | 721 | 0.002 | 0.004 | 0 | 0 | 2 | 12 | DG13S1101 |
| | | | | | | | | | | | | | DG13S166 |
| | | | | | | | | | | | | | D13S1287 |
| | | | | | | | | | | | | | DG13S1061 |
| 0.515 | 1.93E−06 | INF | 422 | 0.048 | 0.094 | 721 | 0 | 0 | 2 | 0 | 0 | 6 | DG13S166 |
| | | | | | | | | | | | | | DG13S163 |
| | | | | | | | | | | | | | D13S290 |
| | | | | | | | | | | | | | DG13S1061 |
| 0.864 | 1.68E−06 | INF | 424 | 0.024 | 0.048 | 717 | 0 | 0 | 0 | 2 | 0 | −16 | DG13S166 |
| | | | | | | | | | | | | | DG13S163 |
| | | | | | | | | | | | | | DG13S1061 |
| | | | | | | | | | | | | | DG13S293 |
| 0.927 | 5.38E−06 | INF | 435 | 0.034 | 0.067 | 720 | 0 | 0 | 4 | 2 | 14 | 3 | DG13S1103 |
| | | | | | | | | | | | | | D13S1287 |
| | | | | | | | | | | | | | DG13S1061 |
| | | | | | | | | | | | | | DG13S301 |

Alleles #'s: For SNP alleles A = 0, C = 1, G = 2, T = 3;
for microsatellite alleles: the CEPH sample (Centre d'Etudes du Polymorphisme Humain, genomics repository) is used as a reference, as described above.
Length = length of haplotype in Mb.
p-val = p-value.
RR = Relative risk.
N_af = Number of patients.
P_al = allelic frequency of haplotype.
P_ca = carrier frequency of haplotype.
N_ct = number of controls.
Alleles = alleles in the haplotype.
Markers = markers in the haplotype.

[0335] TABLE 15
Extended 5 microsatellite marker haplotypes

| 5 markers | : | pos.rr-frqgt1perc | | | | | | | | | | | | |
|---|---|---|---|---|---|---|---|---|---|---|---|---|---|---|
| Length | p-val | RR | N_af | P_al | P_ca | N_ct | P_al | P_ca | Alleles | | | | | Markers |
| 0.851 | 7.45E−06 | 15.43 | 413 | 0.034 | 0.067 | 715 | 0.002 | 0.005 | 0 | 18 | 0 | 0 | 0 | DG13S79 |
| | | | | | | | | | | | | | | D13S1299 |
| | | | | | | | | | | | | | | DG13S87 |
| | | | | | | | | | | | | | | D13S1246 |
| | | | | | | | | | | | | | | DG13S166 |
| 0.964 | 8.07E−06 | INF | 437 | 0.023 | 0.045 | 721 | 0 | 0 | 0 | −12 | 6 | 8 | 6 | DG13S79 |
| | | | | | | | | | | | | | | DG13S83 |
| | | | | | | | | | | | | | | DG13S1104 |
| | | | | | | | | | | | | | | DG13S1103 |
| | | | | | | | | | | | | | | DG13S163 |
| 0.964 | 2.38E−06 | INF | 437 | 0.026 | 0.052 | 720 | 0 | 0 | 0 | 6 | 0 | 8 | 6 | DG13S79 |
| | | | | | | | | | | | | | | DG13S1104 |
| | | | | | | | | | | | | | | DG13S172 |
| | | | | | | | | | | | | | | DG13S1103 |
| | | | | | | | | | | | | | | DG13S163 |
| 0.931 | 7.05E−06 | 5.8 | 429 | 0.068 | 0.131 | 721 | 0.012 | 0.025 | 0 | −6 | 0 | 0 | −2 | DG13S79 |
| | | | | | | | | | | | | | | DG13S1110 |
| | | | | | | | | | | | | | | DG13S175 |
| | | | | | | | | | | | | | | DG13S166 |
| | | | | | | | | | | | | | | D13S1238 |
| 0.964 | 8.13E−06 | INF | 434 | 0.021 | 0.041 | 721 | 0 | 0 | 0 | 3 | 8 | 2 | 6 | DG13S79 |
| | | | | | | | | | | | | | | DG13S1098 |
| | | | | | | | | | | | | | | DG13S1103 |
| | | | | | | | | | | | | | | DG13S166 |
| | | | | | | | | | | | | | | DG13S163 |
| 0.597 | 9.78E−06 | 4.58 | 428 | 0.074 | 0.143 | 717 | 0.017 | 0.034 | −6 | 0 | 0 | 0 | −2 | DG13S1110 |
| | | | | | | | | | | | | | | DG13S89 |
| | | | | | | | | | | | | | | DG13S175 |
| | | | | | | | | | | | | | | DG13S166 |
| | | | | | | | | | | | | | | D13S1238 |
| 0.896 | 6.92E−06 | INF | 428 | 0.026 | 0.051 | 721 | 0 | 0 | −12 | −6 | 0 | −2 | 2 | DG13S83 |
| | | | | | | | | | | | | | | DG13S1110 |
| | | | | | | | | | | | | | | DG13S166 |
| | | | | | | | | | | | | | | D13S1238 |
| | | | | | | | | | | | | | | D13S290 |
| 0.722 | 2.18E−06 | INF | 453 | 0.026 | 0.051 | 738 | 0 | 0 | −6 | 0 | 0 | −2 | 2 | DG13S1110 |
| | | | | | | | | | | | | | | D13S289 |
| | | | | | | | | | | | | | | DG13S166 |
| | | | | | | | | | | | | | | D13S1238 |
| | | | | | | | | | | | | | | D13S290 |
| 0.982 | 7.88E−06 | INF | 437 | 0.028 | 0.055 | 721 | 0 | 0 | 0 | 0 | 4 | 2 | 14 | DG13S87 |
| | | | | | | | | | | | | | | D13S175 |
| | | | | | | | | | | | | | | DG13S1103 |
| | | | | | | | | | | | | | | D13S1287 |
| | | | | | | | | | | | | | | DG13S1061 |
| 0.841 | 8.88E−06 | INF | 438 | 0.032 | 0.062 | 720 | 0 | 0 | 0 | 0 | 4 | 2 | 14 | DG13S89 |
| | | | | | | | | | | | | | | DG13S1111 |
| | | | | | | | | | | | | | | DG13S1103 |
| | | | | | | | | | | | | | | D13S1287 |
| | | | | | | | | | | | | | | DG13S1061 |
| 0.841 | 9.67E−07 | INF | 435 | 0.029 | 0.057 | 721 | 0 | 0 | 0 | 8 | 6 | 0 | 8 | DG13S89 |
| | | | | | | | | | | | | | | DG13S1103 |
| | | | | | | | | | | | | | | DG13S163 |
| | | | | | | | | | | | | | | D13S290 |
| | | | | | | | | | | | | | | DG13S1061 |
| 0.982 | 7.90E−06 | 18.63 | 437 | 0.026 | 0.052 | 721 | 0.001 | 0.003 | 0 | 4 | 0 | 2 | 14 | DG13S87 |
| | | | | | | | | | | | | | | DG13S1103 |
| | | | | | | | | | | | | | | DG13S166 |
| | | | | | | | | | | | | | | D13S1287 |
| | | | | | | | | | | | | | | DG13S1061 |
| 0.841 | 3.52E−06 | 28.52 | 436 | 0.048 | 0.094 | 721 | 0.002 | 0.004 | 0 | 0 | 0 | 2 | 12 | DG13S89 |
| | | | | | | | | | | | | | | DG13S1101 |
| | | | | | | | | | | | | | | DG13S166 |
| | | | | | | | | | | | | | | D13S1287 |
| | | | | | | | | | | | | | | DG13S1061 |
| 0.705 | 5.28E−06 | INF | 435 | 0.027 | 0.053 | 721 | 0 | 0 | 0 | 8 | 6 | 0 | 8 | DG13S175 |
| | | | | | | | | | | | | | | DG13S1103 |
| | | | | | | | | | | | | | | DG13S163 |
| | | | | | | | | | | | | | | D13S290 |
| | | | | | | | | | | | | | | DG13S1061 |
| 0.841 | 4.21E−06 | INF | 422 | 0.048 | 0.093 | 721 | 0 | 0 | 0 | 2 | 0 | 0 | 6 | DG13S89 |
| | | | | | | | | | | | | | | DG13S166 |
| | | | | | | | | | | | | | | DG13S163 |
| | | | | | | | | | | | | | | D13S290 |
| | | | | | | | | | | | | | | DG13S1061 |
| 0.767 | 4.02E−06 | 28.11 | 436 | 0.049 | 0.095 | 721 | 0.002 | 0.004 | 0 | 0 | 0 | 2 | 12 | DG13S1101 |
| | | | | | | | | | | | | | | DG13S175 |
| | | | | | | | | | | | | | | DG13S166 |
| | | | | | | | | | | | | | | D13S1287 |
| | | | | | | | | | | | | | | DG13S1061 |
| 0.767 | 1.29E−06 | 31.07 | 436 | 0.047 | 0.092 | 721 | 0.002 | 0.003 | 0 | 0 | 0 | 2 | 12 | DG13S1101 |
| | | | | | | | | | | | | | | DG13S172 |
| | | | | | | | | | | | | | | DG13S166 |
| | | | | | | | | | | | | | | D13S1287 |
| | | | | | | | | | | | | | | DG13S1061 |
| 0.705 | 4.25E−07 | INF | 422 | 0.048 | 0.093 | 721 | 0 | 0 | 0 | 2 | 0 | 0 | 6 | DG13S175 |
| | | | | | | | | | | | | | | DG13S166 |
| | | | | | | | | | | | | | | DG13S163 |
| | | | | | | | | | | | | | | D13S290 |
| | | | | | | | | | | | | | | DG13S1061 |
| 0.683 | 6.58E−06 | INF | 437 | 0.029 | 0.056 | 721 | 0 | 0 | 0 | 4 | 0 | 2 | 14 | DG13S172 |
| | | | | | | | | | | | | | | DG13S1103 |
| | | | | | | | | | | | | | | DG13S166 |
| | | | | | | | | | | | | | | D13S1287 |
| | | | | | | | | | | | | | | DG13S1061 |
| 0.767 | 2.85E−06 | 32.43 | 436 | 0.044 | 0.087 | 721 | 0.001 | 0.003 | 0 | 0 | 0 | 2 | 12 | DG13S1101 |
| | | | | | | | | | | | | | | DG13S166 |
| | | | | | | | | | | | | | | D13S290 |
| | | | | | | | | | | | | | | D13S1287 |
| | | | | | | | | | | | | | | DG13S1061 |
| 0.865 | 9.58E−06 | 18.39 | 451 | 0.023 | 0.045 | 739 | 0.001 | 0.003 | 0 | 0 | 2 | 2 | −16 | D13S289 |
| | | | | | | | | | | | | | | DG13S166 |
| | | | | | | | | | | | | | | DG13S163 |
| | | | | | | | | | | | | | | D13S1287 |
| | | | | | | | | | | | | | | DG13S293 |
| 0.865 | 5.08E−06 | INF | 453 | 0.019 | 0.038 | 739 | 0 | 0 | 0 | 0 | 2 | 0 | −16 | D13S289 |
| | | | | | | | | | | | | | | DG13S166 |
| | | | | | | | | | | | | | | DG13S163 |
| | | | | | | | | | | | | | | DG13S1061 |
| | | | | | | | | | | | | | | DG13S293 |
| 0.927 | 1.02E−07 | 27.65 | 437 | 0.037 | 0.073 | 721 | 0.001 | 0.003 | 4 | 0 | 2 | 14 | 3 | DG13S1103 |
| | | | | | | | | | | | | | | DG13S166 |
| | | | | | | | | | | | | | | D13S1287 |
| | | | | | | | | | | | | | | DG13S1061 |
| | | | | | | | | | | | | | | DG13S301 |

Length = length of haplotype in Mb.
p-val = p-value.
RR = Relative risk.
N_af = Number of patients.
P_al = allelic frequency of haplotype.
P_ca = carrier frequency of haplotype.
N_ct = number of controls.
Alleles = alleles in the haplotype.
Markers = markers in the haplotype

### EXAMPLE 2

### Relationship Between Polymorphism in the 5-Lipoxygenase Promoter and MI

[0336] A family of mutations in the G-C rich transcription factor binding region of the 5-LO gene has previously been identified. These mutations consist of deletion of one, deletion of two, or addition of one zinc finger (Sp1/Egr-1) binding sites in the region 176 to 147 bp upstream from the ATG translation start site where there are normally 5 Sp1 binding motifs in tandem. These naturally occurring mutations in the human 5-LO gene promoter have been shown to modify transcription factor binding and reporter gene transcription. The capacity of the mutant forms of DNA to promote transcription of CAT reporter constructs have been shown to be significantly less than that of the wild type DNA (J. Clin. Invest. Volume 99, Number 5, March 1997, 1130-1137).

[0337] To test whether 5-LO is associated with the atherosclerotic diseases, particularly myocardial infarction (MI) in the human population, this promoter polymorphism, consisting of variable number of tandem Sp1/Egr-1 binding sites, was genotyped in 1112 MI patients, 748 patients with PAOD, and 541 stroke patients.

[0338] The results, shown in Table 16, demonstrate that the wild type allele (which represents the allele with the most active promoter and thus with the highest expression of the 5-LO mRNA; J. Clin. Invest. Volume 99, Number 5, March 1997, 1130-1137) is significantly associated with MI (RR=1.2, p<0.05). The results are consistent with a disease hypothesis that increased expression of the 5-LO plays a role in the pathogenesis of MI.

TABLE 16

| | | | | | Risk | P- |
|---|---|---|---|---|---|---|
| | N_aff | Frq_aff | N_ctrl | Frq_ctrl | Ratio | value |
| MI patients | 1112 | 0.8701 | 734 | 0.8501 | 1.1803 | 0.048 |
| Independent | 969 | 0.8720 | 734 | 0.8501 | 1.2013 | 0.037 |
| Males | 646 | 0.8740 | 734 | 0.8501 | 1.2232 | 0.039 |
| Females | 465 | 0.8645 | 734 | 0.8501 | 1.1249 | 0.180 |
| Age of | 522 | 0.8745 | 734 | 0.8501 | 1.2286 | 0.046 |
| onset <60 | | | | | | |
| Males | 353 | 0.8768 | 734 | 0.8501 | 1.2542 | 0.053 |
| Females | 169 | 0.8698 | 734 | 0.8501 | 1.1779 | 0.202 |
| PAOD patients | 748 | 0.8763 | 734 | 0.8501 | 1.2492 | 0.022 |
| Independent | 703 | 0.8755 | 734 | 0.8501 | 1.2400 | 0.027 |
| Males | 473 | 0.8774 | 734 | 0.8501 | 1.2613 | 0.033 |
| Females | 275 | 0.8745 | 734 | 0.8501 | 1.2289 | 0.092 |
| Stroke | 541 | 0.8743 | 734 | 0.8501 | 1.2262 | 0.046 |
| patients | | | | | | |
| Males | 326 | 0.8758 | 734 | 0.8501 | 1.2427 | 0.067 |
| Females | 215 | 0.8721 | 734 | 0.8501 | 1.2019 | 0.144 |
| Cardio/Large V | 202 | 0.8861 | 734 | 0.8501 | 1.3719 | 0.038 |
| Cardioembolic | 114 | 0.8772 | 734 | 0.8501 | 1.2592 | 0.165 |
| Large Vessel | 88 | 0.8977 | 734 | 0.8501 | 1.5474 | 0.053 |
| Small Vessel | 77 | 0.8831 | 734 | 0.8501 | 1.2791 | 0.163 |
| Hemorrhagic | 27 | 0.9259 | 734 | 0.8501 | 2.2035 | 0.081 |

Single sided p-values: Fisher exact test.
N_aff = number of affected individuals;
Frq_aff = frequency of the wild type allele of the promoter polymorphism in the affected group;
N_ctrl = number of controls;
Frq_ctrl = frequency of the wild type allele of the promoter polymorphism in the control group;

### EXAMPLE 3

### Elevated LTE4 Biosynthesis in Individuals with the Flap MI-Risk Haplotype

[0339] Based on the known function of the end products of the leukotriene pathway and based on our 5-LO association data, the association of the FLAP haplotype with MI is best explained by increased expression and/or increased function of the FLAP gene. In other words, those individuals that have a “at risk” FLAP haplotype have either, or both, increased amount of FLAP, or more active FLAP. This would lead to increased production of leukotrienes in these individuals.

[0340] To demonstrate this theory, LTE4, a downstream leukotriene metabolite, was measured in patient serum samples. A quantitative determination of LTE4 in human serum was performed by liquid chromatography coupled with tandem mass spectrometry. The protocol was performed as follows:

[0341] Analytical Method

TABLE P1
(Protocol 1): List of Abbreviations

| | |
|---|---|
| CAN | Acetonitrile |
| IS | Internal standard |
| LC-MS/MS | Liquid chromatography tandem mass spectrometry |
| LOQ | Limit of quantification |
| QCs | Quality controls |
| R² | Coefficient of determination |
| SS | Spiking solution |

[0342] Apparatus and Conditions

TABLE P2
Analytical apparatus and conditions

| Instruments/Conditions | Details | | | |
|---|---|---|---|---|
| Analytical column | Zorbax extend C₁₈, 3.5 μm (50 × 2.1 mm) | | | |
| Column temperature | Ambient | | | |
| Pump and flow | Hewlett Packard Series 1100 Binary pump delivering 0.3 ml/min | | | |
| Mobile phase | A: Buffer: Acetonitrile:H₂O (5:95% v/v). (Containing 10 mM | | | |
| | Ammonium Acetate and 0.1% Acetic acid at pH 4.6). | | | |
| | B: Buffer: Acetonitrile:H₂O (95:5% v/v). (Containing 10 mM | | | |
| | Ammonium Acetate and 0.1% Acetic acid at pH 4.6). | | | |
| Gradient | Time | % A | % B | Flow rate |
| | 0.00 | 30 | 70 | 0.3 ml/min |
| | 1.00 | 30 | 70 | 0.3 ml/min |
| | 1.50 | 90 | 10 | 0.3 ml/min |
| | 6.00 | 90 | 10 | 0.3 ml/min |
| | 6.50 | 30 | 70 | 0.3 ml/min |
| | 10.00 | 30 | 70 | 0.3 ml/min |

| Sample injection | HTC PAL autosampler 10 μl onto the HPLC column | | |
|---|---|---|---|
| Mass Spectrometric | Quattro Ultima ™ Tandem MS/MS, Micromass. England. | | |
| system | | | |
| Recording and | Mass Lynx, version 3.5. All chromatograms and reports are | | |
| integration | printed out in hardcopy and stored in electronic form on the | | |
| | workstation hard disk drive. Recording time was 10 min. | | |
| Retentions times | LTE₄˜3.05 min. | | |
| | LTE₄-d₃˜3.05 min. | | |
| Ionization mode | Electrospray atmospheric pressure in negative ion mode | | |
| Scan mode | Multiple reaction monitoring (MRM) | | |
| | Compound | Parent ion | Daughter ion |
| | LTE₄ | 438.2 | 333.2 |
| | LTE₄-d₃ | 441.2 | 336.2 |

[0343] Other Instruments

TABLE P3
The apparatus used for sample treatment and measurements

| Apparatus | Brand | Type |
|---|---|---|
| Pipette | Eppendorf | Edos 5221 |
| Pipette | Labsystems | Finnpipette 200 μl |
| Centrifuge | Eppendorf | 5417C |
| Evaporation unit | Porvair | Ultravap |
| Vibrofix | Ika-Werk | VF-1 |
| | Thermolyne | Maxi-mix III ™, 65800 |
| Balance | Sartorius | LA 120 S |
| Ultra sonic bath | Cole Parmer | 8891 |

[0344] Materials

TABLE P4
Reagents for sample treatment and measurements

| Reagent | Manufacturer | Quality | Art no. |
|---|---|---|---|
| Acetonitrile (ACN) | Rathburn | HPLC grade | RH 1016 |
| Methanol | Rathburn | HPLC grade | RH 1019 |
| Ammonium acetate | Merck | Pro analysis | 1116 |

[0345] TABLE P5
Reference substances

| | Details | Reference |
|---|---|---|
| Reference standards | Leukotrine E₄ from Cayman | 20410 |
| | Chemical, MI, USA | |
| Internal standards | Leukotriene E₄-20, 20, 20-d₃ from | S10120 |
| | Biomol, PA, USA | |

[0346] Stock Solutions

[0347] A stock solution of LTE₄ was prepared by the supplier at a concentration of 100 μg/ml in methanol. The stock solution was diluted to a concentration of 20 μg/ml in methanol and this working solution (WS-1) was kept refrigerated at 2-8° C.

[0348] An internal standard stock solution (LTE₄-d₃) was prepared by the supplier at concentration of 49.5 μg/ml. The stock solution was diluted to a concentration of 1 μg/ml in methanol and this working solution was kept refrigerated at 2-8° C.

[0349] Preparation of spiking solutions, calibration standards and quality control samples

[0350] Spiking solutions (SS) in the concentration range of 1 ng/ml to 10000 ng/ml were prepared by dilution of the working Solution.

[0351] The following spiking solutions were prepared:

TABLE P6
Spiking solutions for calibration standards

| | Concentration | |
|---|---|---|
| SS | (ng/ml) | Preparation |
| 1 | 10000 | 500 μl of WS-1 (20 μg/ml) diluted to 1.0 ml with |
| | | 70% MeOH/water |
| 2 | 1000 | 100 μl of SS-1 was diluted to 1.0 ml with 70% |
| | | MeOH/water |
| 3 | 100 | 100 μl of SS-2 was diluted to 1.0 ml with 70% |
| | | MeOH/water |
| 4 | 30 | 300 μl of SS-3 was diluted to 1.0 ml with 70% |
| | | MeOH/water |
| 5 | 20 | 200 μl of SS-3 was diluted to 1.0 ml with 70% |
| | | MeOH/water |
| 6 | 16 | 160 μl of SS-3 was diluted to 1.0 ml with 70% |
| | | MeOH/water |
| 7 | 12 | 120 μl of SS-3 was diluted to 1.0 ml with 70% |
| | | MeOH/water |
| 8 | 8.0 | 400 μl of SS-5 was diluted to 1.0 ml with 70% |
| | | MeOH/water |
| 9 | 4.0 | 200 μl of SS-5 was diluted to 1.0 ml with 70% |
| | | MeOH/water |
| 10 | 2.0 | 100 μl of SS-5 was diluted to 1.0 ml with 70% |
| | | MeOH/water |
| 11 | 1.4 | 175 μl of SS-8 was diluted to 1.0 ml with 70% |
| | | MeOH/water |
| 12 | 1.0 | 125 μl of SS-8 was diluted to 1.0 ml with 70% |
| | | MeOH/water |

[0352] TABLE P7
Spiking solutions for quality controls

| | Concentration | |
|---|---|---|
| SS | (ng/ml) | Preparation |
| 13 | 14 | 140 μl of SS-3 was diluted to 1.0 ml with 70% |
| | | MeOH/water |
| 14 | 6.0 | 300 μl of SS-5 was diluted to 1.0 ml with 70% |
| | | MeOH/water |
| 15 | 2.4 | 120 μl of SS-5 was diluted to 1.0 ml with 70% |
| | | MeOH/water |

[0353] After preparation, spiking solutions for calibration standards and quality controls were kept refrigerated at 2-8° C.

### Preparation of Calibration Standards and Quality Controls

[0354] Fresh calibration standards and quality controls (QCs) were prepared each day by spiking blank plasma as described in Tables P8 and P9, respectively.

TABLE P8
Preparation of calibration standards

| Concentration | | |
|---|---|---|
| (ng/ml) | SS (μl) | Blank Plasma |
| 1500 | 20 μl of the SS-4 (30 ng/ml) | 380 μl |
| 1000 | 20 μl of the SS-5 (20 ng/ml) | 380 μl |
| 800 | 20 μl of the SS-6 (16 ng/ml) | 380 μl |
| 600 | 20 μl of the SS-7 (12 ng/ml) | 380 μl |
| 400 | 20 μl of the SS-8 (8 ng/ml) | 380 μl |
| 200 | 20 μl of the SS-9 (4.0 ng/ml) | 380 μl |
| 100 | 20 μl of the SS-10 (2.0 ng/ml) | 380 μl |
| 70 | 20 μl of the SS-11 (1.4 ng/ml) | 380 μl |
| 50 | 20 μl of the SS-12 (1.0 ng/ml) | 380 μl |

[0355] TABLE P9
Preparation of quality controls

| Concentration | | |
|---|---|---|
| (ng/ml) | SS (μl) | Blank Plasma |
| 800 | 20 μl of the SS-13 (14 ng/ml) | 380 μl |
| 40 | 20 μl of the SS-14 (6.0 ng/ml) | 380 μl |
| 8.0 | 20 μl of the SS-15 (2.4 ng/ml) | 380 μl |

[0356] Sample Preparation

[0357] Aliquots of 400 μl of each study sample, calibration standards, QC samples and control blank are pipetted into an eppendorf vial. All samples apart from blank are then spiked with 20 μl of internal standard working solution and the samples are then vortex-mixed for few seconds. The pH of the plasma samples is adjusted to pH 4.5 using 60 μl of 10% acetic acid and centrifuged for 10 min. at 4100 rpm immediately before the extraction. The solid phase extraction 96-well plate is conditioned with 1 ml methanol and 1 ml water. Then 400 μl of the plasma samples are loaded on the plate. Vacuum is applied, followed by drying the disk for 1 min. After being washed with 2 ml water and 1 ml 30% methanol in 2% acetic acid. Next the plate is eluted with 0.6 ml methanol. The plate is then dried for few minutes. The methanol eluate is evaporated almost to dryness under a stream of nitrogen at 45° C. The residue is reconstituted in 30 μl mobile phase and vortex-mixed for few min. Subsequently, the solutions are centrifuged for 10 min at 10.000 rpm. and 10 μl are injected by the autosampler into the LC-MS/MS system for quantification.

### Performance Of Measurements

[0358] The samples will be prepared and measured in batches and a typical batch will consist of:

[0359] One set of calibration standards, one extra lowest calibration standard and one blank.

[0360] Samples collected from a 16 individuals and one set of control samples (C_{L}, C_{M}, C_{H})

[0361] Samples collected from a 17 individuals and one set of control samples (C_{L}, C_{M}, C_{H})

### Quantitative Determination of Analyte in Plasma Samples

[0362] The standard curve is calculated from the peak area ratios ANALYTE/INTERNAL STANDARD of the calibration standards and their nominal ANALYTE concentrations. The unknown samples for LTE₄ were calculated from a quadratic regression equation where a weighted curve, 1/X², is used. The measured peak area of the samples was converted into pictogram of ANALYTE per milliliter (pg/ml) of plasma according to the calculated equation for the standard curve.

[0363] The calculation of the regression for the standard curve and the calculations of the concentration of the unknown samples and the control samples are performed with MassLynx Software.

### Acceptance Criteria

Calibration Standards

[0364] The coefficient of determination (R²) for the calibration curve must exceed 0.98.

[0365] The calibration curve included the concentration range from 50 pg/ml-1500 pg/ml.

[0366] Concentration of the calibration standards must be within ±25% of their nominal value when recalculated from the regression equation. Calibration standards that fail these criteria (at most 3 in each run) are rejected and the calibration performed again with the remaining standards. If the standard curve is not accepted, the samples must be reanalyzed.

Control Samples

[0367] At least two thirds of the analysed quality controls must be within ±25% of their nominal value when calculated from regression equation. If more than a third of the controls fail, the samples must be reanalyzed.

### Results

[0368] Table 17 (below) shows that the female MI “at risk” haplotype was more associated with female MI patients who have high LTE4 levels (top 50th percentile), than with female MI patients who have low levels of LTE4 (bottom 50th percentile).

[0369] In addition, haplotype analysis, comparing female MI patients with high levels of LTE4 with female patients with low levels, showed that those with high levels had increased prevalence of the “at risk” haplotype by 1.6 fold (see Table 18). Although the association did not rise to the level of statistical significance, the results show clearly that the “at risk” haplotypes are enriched in the MI patient group that has high levels of LTE4. The carrier frequency of the “at risk” haplotypes are 12% and 20%, respectively, in the whole female MI group, but go up to 15% and 24%, respectively, in the female MI group that has high levels of LTE4. Correspondingly, the carrier frequency of the “at risk” haplotypes decrease to 8% and 18%, respectively, in the group of female MI that has low levels of LTE4 (Note carrier frequencies are twice the disease allele frequency times 1 minus the disease allele frequency plus the square of the disease allele frequency).

[0370] Note that LTE4 may simply reflect the leukotriene synthesis rate of the leukotriene synthetic pathway upstream of the key leukotriene metabolite involved in MI risk. For example, leukotriene B4 is probably more likely than leukotriene E4 to be involved in the inflammatory aspects of MI plaques but since B4 has a short half life, it is difficult to measure reliably in serum samples, while E4 has long term stability.

TABLE 17
Association of the at risk haplotypes for female MI, with
female MI who also have high levels of LTE4 (>50 pg/ml (roughly the upper 50th
percentile).

| | SG13S418 | SG13S420 | DG13S166 | SG13S114 | SG13S88 | SG13S184 | D13S1238 |
|---|---|---|---|---|---|---|---|
| High | C | T | 0 | T | T | G | −2 |
| LTE4 | C | T | 0 | | | G | −2 |
| Low | C | T | 0 | T | T | G | −2 |
| LTE4 | C | T | 0 | | | G | −2 |

| | p-val | N_aff | aff.frq | N_ctrl | ctrl.frq | rel_risk | PAR | info |
|---|---|---|---|---|---|---|---|---|
| High LTE4 | 3.72E−06 | 221 | 0.075 | 809 | 0.014 | 5.51 | 0.115 | 0.565 |
| | 2.30E−05 | 220 | 0.122 | 809 | 0.046 | 2.89 | 0.154 | 0.608 |
| Low LTE4 | 4.65E−02 | 185 | 0.040 | 809 | 0.015 | 2.67 | 0.048 | 0.511 |
| | 2.88E−02 | 182 | 0.087 | 809 | 0.048 | 1.89 | 0.08 | 0.622 |

P-val: p-value for the association.
N_aff: Number of patients used in the analysis.
Aff. frq: haplotype frequency in patients.
N_ctrl: number of controls used in the analysis.
Ctrl.frq: Haplotype frequency in controls.
Rel_risk: Relative risk of the haplotype.
PAR: population attributable risk.
Info: information content. Less association was found between the at risk haplotype for female MI, with female MI who also have low levels of LTE4 (<50 pg/ml).

[0371] TABLE 18
Association between haplotypes that were most significantly
associated with female MI, and serum LTE4 levels.

| | SG13S418 | SG13S420 | DG13S166 | SG13S114 | SG13S88 | SG13S184 |
|---|---|---|---|---|---|---|
| High vs low LTE4 | C | T | 0 | T | T | G |
| | C | T | 0 | | | G |

| | D13S1238 | p-val | N_aff | aff.frq | N_ctrl | ctrl.frq | rel_risk | PAR | info |
|---|---|---|---|---|---|---|---|---|---|
| High | −2 | 1.61E−01 | 221 | 0.084 | 185 | 0.054 | 1.61 | 0.063 | 0.689 |
| vs | −2 | 1.20E−01 | 220 | 0.13 | 182 | 0.088 | 1.54 | 0.089 | 0.686 |
| low | | | | | | | | | |
| LTE4 | | | | | | | | | |

P-val: p-value for the association.
N_aff: Number of patients used in the analysis.
Aff. frq: haplotype frequency in patients.
N_ctrl: number of controls used in the analysis.
Ctrl.frq: Haplotype frequency in controls.
Rel_risk: Relative risk of the haplotype.
PAR: population attributable risk.
Info: information content. Here, the group of affected individuals were defined as female MI patients with high serum LTE4 (higher than 50 pg/ml) and the control group is defined as female MI patients with low serum LTE4 (below 50 pg/ml).

### EXAMPLE 4

### Elevated LTE4 Correlated with Elevated C-Reactive Protein (CRP)

[0372] The relationship between the increased production of leukotrienes and the inflammatory marker CRP, a well established risk factor for MI, was then explored. As shown in FIG. 4, a significant positive correlation was found between serum LTE4 levels and serum CRP levels.

### EXAMPLE 5

### Assessment of Level of CRP in Patients with at-Risk Haplotype

[0373] The level of CRP in female patients with female MI at-risk haplotypes was assessed, in order to assess whether there was a presence of a raised level of inflammatory marker in the presence of the female MI at-risk haplotype. Results are shown in Table 19. Although the association did not rise to the level of statistical significance, it was demonstrated that the average CRP was elevated in those patients with the at-risk haplotype versus those without it.

TABLE 19
All female patients

| | | no | Mean CRP | SE CRP |
|---|---|---|---|---|
| affecteds: | With haplotype. | 155 | 4.91 | 8.7 |
| | Not with haplotype. | 218 | 4.35 | 6.13 |

### EXAMPLE 6

### Elevated Serum LTE4 Levels in MI Patients Versus Controls

[0374] The end products of the leukotriene pathway are potent inflammatory lipid mediators that can potentially contribute to development of atherosclerosis and destabilization of atherosclerotic plaques through lipid oxidation and/or proinflammatory effects. Examples one through five show that: 1) MI correlates with genetic variation at FLAP; 2) MI correlates with high expression promoter polymorphism at 5-LO; 3) C-reactive protein levels correlate with serum leukotriene E4; and 4) Patients with MI-risk FLAP haplotypes have higher levels of serum leukotriene E4 and CRP. Based on these data, it was hypothesized that serum leukotriene E4 levels correlate with MI risk.

[0375] To test this hypothesis, LTE4, a downstream leukotriene metabolite, was measured in 488 female MI patient and 164 control serum samples. The LTE4 levels for the patients were higher than that for the controls using a one-sided Wilcoxon rank-sum test. The p-value of the difference was 0.0092, thus confirming our hypothesis. Therefore, elevated leukotriene E4 represents a risk factor for MI. Serum or plasma LTE4 levels may be used to profile the MI risk for individuals to aid in deciding which treatment and lifestyle management plan is best for primary or secondary MI prevention. In the same way other leukotriene metabolites may be used to risk profile for MI.

### EXAMPLE 7

### Increased LTB4 Production in Activated Neutrophils from MI Patients

[0376] A principal bioactive product of one of the two branches of the 5-LO pathway is LTB4. To determine whether the patients with past history of MI have increased activity of the 5-LO pathway compared to controls, the LTB4 production in isolated blood neutrophils was measured before and after stimulation in vitro with the calcium ionophore, ionomycin. No difference was detected between the LTB4 production in resting neutrophils from MI patients or controls (results not shown). In contrast, the LTB4 generation by neutrophils from MI patients stimulated with the ionophore was significantly greater than by neutrophils from controls at 15 and 30 minutes, respectively (FIG. 5.1). Moreover, as shown in FIG. 5.2, the observed increase in the LTB4 release was largely accounted for by male carriers of haplotype A4, whose cells produced significantly more LTB4 than cells from controls (P value=0.0042) (Table 20). As shown in Table 20, there was also a heightened LTB4 response in males who do not carry HapA but of borderline significance. This could be explained by additional variants in the FLAP gene that have not been uncovered, or alternatively in other genes belonging to the 5-LO pathway, that may account for upregulation in the LTB4 response in some of the patients without the FLAP at-risk haplotype. As shown in Table 20, differences in LTB4 response were not detected in females. However, due to a small sample size this cannot be considered conclusive. Taken together, the elevated levels of LTB4 production of stimulated neutrophils from male carriers of the at-risk haplotype suggest that the disease associated variants in the FLAP gene increase FLAP's response to factors that stimulate inflammatory cells, resulting in increased leukotriene production and increased risk for MI.

### Methods

[0377] Isolation and Activation of Peripheral Blood Neutrophils

[0378] 50 ml of blood were drawn into EDTA containing vacutainers from 43 MI patients and 35 age and sex matched controls. All blood was drawn at the same time in the early morning after 12 hours of fasting. The neutrophils were isolated using Ficoll-Paque PLUS (Amersham Biosciences).

[0379] Briefly, the red cell pellets from the Ficoll gradient were harvested and red blood cells subsequently lysed in 0.165 M NH₄CL for 10 minutes on ice. After washing with PBS, neutrophils were counted and plated at 2×10⁶ cells/ml in 4 ml cultures of 15% Fetal calf serum (FCS) (GIBCO BRL) in RPMI-1640 (GIBCO BRL). The cells were then stimulated with maximum effective concentration of ionomycin (1 μM). At 0, 15, 30, 60 minutes post ionomycin addition 600 μl of culture medium was aspirated and stored at −80C for the measurement of LTB4 release as described below. The cells were maintained at 37° C. in a humidified atmosphere of 5% CO₂/95% air. All samples were treated with indomethasine (1 μM ) to block the cyclooxygenase enzyme.

[0380] Ionomycin-induced Release of LTB4 in Neutrophils

[0381] LTB4 Immunoassay (R&D systems) was used to quantitate LTB4 concentration in supernatant from cultured ionomycin stimulated neutrophils. The assay used is based on the competitive binding technique in which LTB4 present in the testing samples (200 □l) competes with a fixed amount of alkaline phosphatase-labelled LTB4 for sites on a rabbit polyclonal antibody. During the incubation, the polyclonal Ab becomes bound to a goat anti-rabbit Ab coated onto the microplates. Following a wash to remove excess conjugate and unbound sample, a substrate solution is added to the wells to determine the bound enzyme activity. The color development is stopped and the absorbance is read at 405 nm. The intensity of the color is inversely proportional to the concentration of LTB4 in the sample. Each LTB4 measurement using the LTB4 Immunoassay, was done in duplicate.

TABLE 20
LTB4 levels after ionomycin stimulation of isolated neutrophils^{a}

| | After 15 Minutes | | After 30 Minutes | |
|---|---|---|---|---|
| Phenotype (n) | Mean (SD) | P value | Mean (SD) | P value |
| Controls (35) | 4.53 (1.00) | | 4.67 (0.88) | |
| Males (18) | 4.61 (1.10) | | 4.68 (1.07) | |
| Females (17) | 4.51 (0.88) | | 4.67 (0.62) | |
| MI (41) | 5.18 (1.09) | 0.011 | 5.24 (1.06) | 0.016 |
| Carriers(16) | 5.26 (1.09) | 0.027 | 5.27 (1.09) | 0.051 |
| Non-carriers (24) | 5.12 (1.08) | 0.040 | 5.22 (1.03) | 0.035 |
| MI males (28) | 5.37 (1.10) | 0.0033 | 5.38 (1.09) | 0.0076 |
| Carriers(10) | 5.66 (1.04) | 0.0042 | 5.58 (1.12) | 0.013 |
| Non-carriers (18) | 5.20 (1.09) | 0.039 | 5.26 (1.05) | 0.041 |
| MI females (13) | 4.78 (0.95) | 0.46 | 4.95 (0.92) | 0.36 |
| Carriers(6) | 4.59 (0.80) | 0.90 | 4.75 (0.82) | 0.85 |
| Non-carriers (7) | 4.94 (1.04) | 0.34 | 5.12 (0.96) | 0.25 |
| ^{a}Mean ± SD of log-transformed values of LTB4 levels of ionomycin-stimulated neutrophils from MI patients and controls. Results are shown for two time points: 15 and 30 minutes. The results for males and females and for MI male and female carriers and non-carriers of | | | | |
| #the at-risk haplotype HapA are shown separately. Two-sided p values corresponding to a standard two-sample test of the difference in the mean values between the MI patients, their various sub-cohorts and the controls are shown. | | | | |

### EXAMPLE 8

### Haplotypes Associated With MI also Confer Risk of Stroke and PAOD

[0382] Because stroke and PAOD are diseases that are closely related to MI (all occur on the basis of atherosclerosis), it was examined whether the SNP haplotype in the FLAP gene that confers risk to MI also conferred risk of stroke and/or PAOD. The ‘at risk’ haplotype (A4 haplotype)can be defined by the following 4 SNPs: SG13S25 with allele G, SG13S114 with allele T, SG13S89 with allele G, and SG13S32 with allele A.

[0383] Table 21 shows that the haplotype A4 increases the risk of having a stroke to a similar extent as it increases the risk of having an MI. The ‘at risk’ haplotype is carried by 28% of stroke patients and 17% of controls, meaning that the relative risk of having stroke for the carriers of this haplotype is 1.7 (p-value=5.8 10⁻⁰⁶). Although not as significant, the ‘at risk’ haplotype also confers risk of having PAOD.

TABLE 21

| | p-val | r | #aff | aff.frq. | #con | con.frq. | info | SG13S25 |
|---|---|---|---|---|---|---|---|---|
| MI haplotypes | | | | | | | | |
| All MI patients | | | | | | | | |
| A4 | 5.3E−07 | 1.80 | 1407 | 0.16 | 614 | 0.09 | 0.82 | G |
| B4 | 1.0E−04 | 1.87 | 1388 | 0.10 | 612 | 0.06 | 0.67 | G |
| Males MI | | | | | | | | |
| A4 | 2.5E−08 | 2.00 | 864 | 0.17 | 614 | 0.09 | 0.82 | G |
| B4 | 1.1E−05 | 2.12 | 852 | 0.11 | 612 | 0.06 | 0.67 | G |
| Females MI | | | | | | | | |
| A4 | 1.9E−02 | 1.44 | 543 | 0.13 | 614 | 0.09 | 0.73 | G |
| B4 | 7.9E−02 | 1.45 | 536 | 0.08 | 612 | 0.06 | 0.60 | G |
| Replication in stroke | | | | | | | | |
| All stroke patients | | | | | | | | |
| A4 | 5.8E−06 | 1.73 | 1238 | 0.15 | 614 | 0.09 | 0.80 | G |
| B4 | 2.3E−04 | 1.83 | 1000 | 0.10 | 612 | 0.06 | 0.71 | G |
| Males stroke | | | | | | | | |
| A4 | 1.1E−06 | 1.91 | 710 | 0.17 | 614 | 0.09 | 0.79 | G |
| B4 | 3.1E−05 | 2.11 | 574 | 0.11 | 612 | 0.06 | 0.72 | G |
| Females stroke | | | | | | | | |
| A4 | 9.9E−03 | 1.49 | 528 | 0.13 | 614 | 0.10 | 0.74 | G |
| B4 | 6.3E−02 | 1.47 | 426 | 0.08 | 612 | 0.06 | 0.70 | G |
| All stroke excluding MI | 8.4E−05 | 1.65 | 1054 | 0.15 | 614 | 0.09 | 0.78 | G |
| Males stroke excluding MI | 6.4E−05 | 1.78 | 573 | 0.16 | 614 | 0.09 | 0.75 | G |
| Females stroke excluding MI | 1.2E−02 | 1.49 | 481 | 0.14 | 614 | 0.10 | 0.72 | G |
| Cardioembolic stroke | 6.6E−04 | 1.87 | 248 | 0.16 | 614 | 0.10 | 0.74 | G |
| Cardioembolic stroke excluding MI | 3.8E−02 | 1.56 | 191 | 0.14 | 614 | 0.10 | 0.70 | G |
| Large vessel stroke | 8.0E−02 | 1.47 | 150 | 0.13 | 614 | 0.09 | 0.83 | G |
| Large vessel stroke excluding MI | 2.9E−01 | 1.31 | 114 | 0.12 | 614 | 0.09 | 0.80 | G |
| Small vessel stroke | 7.2E−04 | 2.05 | 166 | 0.18 | 614 | 0.09 | 0.71 | G |
| Small vessel stroke excluding MI | 1.0E−04 | 2.31 | 152 | 0.20 | 614 | 0.10 | 0.71 | G |
| Hemorrhagic stroke | 4.4E−02 | 1.73 | 97 | 0.15 | 614 | 0.09 | 0.72 | G |
| Hemorrhagic stroke excluding MI | 3.9E−02 | 1.78 | 92 | 0.16 | 614 | 0.09 | 0.71 | G |
| Unknown cause stroke | 1.3E−04 | 1.88 | 335 | 0.16 | 614 | 0.09 | 0.75 | G |
| Unknown cause stroke excluding | 6.5E−04 | 1.82 | 297 | 0.16 | 614 | 0.09 | 0.72 | G |
| MI | | | | | | | | |
| MI and stroke together | | | | | | | | |
| All patients | | | | | | | | |
| Best haplo A4 | 4.1E−07 | 1.75 | 2659 | 0.15 | 614 | 0.09 | 0.82 | G |
| B4 | 4.1E−05 | 1.85 | 2205 | 0.10 | 612 | 0.06 | 0.70 | G |
| Males | | | | | | | | |
| A4 | 1.4E−08 | 1.93 | 1437 | 0.17 | 614 | 0.09 | 0.82 | G |
| B4 | 2.0E−06 | 2.11 | 1290 | 0.11 | 612 | 0.06 | 0.70 | G |
| Females | | | | | | | | |
| A4 | 3.6E−03 | 1.47 | 1024 | 0.13 | 614 | 0.09 | 0.77 | G |
| B4 | 2.8E−02 | 1.48 | 915 | 0.08 | 612 | 0.06 | 0.66 | G |
| Patients with both MI and stroke | | | | | | | | |
| A4 | 6.1E−05 | 2.10 | 184 | 0.18 | 614 | 0.09 | 0.86 | G |
| Replication in PAOD | | | | | | | | |
| All PAOD patients | 3.6E−02 | 1.31 | 920 | 0.12 | 614 | 0.10 | 0.84 | G |
| Males PAOD | 1.8E−02 | 1.40 | 580 | 0.13 | 614 | 0.10 | 0.84 | G |
| Females PAOD | 3.7E−01 | 1.17 | 340 | 0.11 | 614 | 0.10 | 0.83 | G |
| All PAOD excluding MI | 1.1E−01 | 1.24 | 750 | 0.12 | 614 | 0.10 | 0.83 | G |
| Males PAOD excluding MI | 8.3E−02 | 1.30 | 461 | 0.12 | 614 | 0.10 | 0.83 | G |
| Males PAOD excluding MI and | 8.7E−02 | 1.32 | 388 | 0.12 | 614 | 0.10 | 0.83 | G |
| stroke | | | | | | | | |

| | SG13S106 | SG13S114 | SG13S89 | SG13S30 | SG13S32 | SG13S42 |
|---|---|---|---|---|---|---|
| MI haplotypes | | | | | | |
| All MI patients | | | | | | |
| A4 | | T | G | | A | |
| B4 | G | | | G | | A |
| Males MI | | | | | | |
| A4 | | T | G | | A | |
| B4 | G | | | G | | A |
| Females MI | | | | | | |
| A4 | | T | G | | A | |
| B4 | G | | | G | | A |
| Replication in stroke | | | | | | |
| All stroke patients | | | | | | |
| A4 | | T | G | | A | |
| B4 | G | | | G | | A |
| Males stroke | | | | | | |
| A4 | | T | G | | A | |
| B4 | G | | | G | | A |
| Females stroke | | | | | | |
| A4 | | T | G | | A | |
| B4 | G | | | G | | A |
| All stroke excluding MI | | T | G | | A | |
| Males stroke excluding MI | | T | G | | A | |
| Females stroke excluding MI | | T | G | | A | |
| Cardioembolic stroke | | T | G | | A | |
| Cardioembolic stroke excluding M | T | G | | A | I | |
| Large vessel stroke | | T | G | | A | |
| Large vessel stroke excluding MI | T | G | | A | | |
| Small vessel stroke | | T | G | | A | |
| Small vessel stroke excluding MI | T | G | | A | | |
| Hemorrhagic stroke | | T | G | | A | |
| Hemorrhagic stroke excluding MI | | T | G | | A | |
| Unknown cause stroke | | T | G | | A | |
| Unknown cause stroke excluding | | T | G | | A | |
| MI | | | | | | |
| MI and stroke together | | | | | | |
| All patients | | | | | | |
| Best haplo A4 | | T | G | | A | |
| B4 | G | | | G | | A |
| Males | | | | | | |
| A4 | | T | G | | A | |
| B4 | G | | | G | | A |
| Females | | | | | | |
| A4 | | T | G | | A | |
| B4 | G | | | G | | A |
| Patients with both MI and stroke | | | | | | |
| A4 | | T | G | | A | |
| Replication in PAOD | | | | | | |
| All PAOD patients | | T | G | | A | |
| Males PAOD | | T | G | | A | |
| Females PAOD | | T | G | | A | |
| All PAOD excluding MI | | T | G | | A | |
| Males PAOD excluding MI | | T | G | | A | |
| Males PAOD excluding MI and | | T | G | | A | |
| stroke | | | | | | |

[0384] The patient cohorts used in the association analysis shown in Table 21 may include first and second degree relatives.

[0385] Table 21, discussed above, shows the results of the haplotype A4 association study using 779 MI patients, 702 stroke patients, 577 PAOD patients and 628 controls. First and second degree relatives were excluded from the patient cohorts. All known cases of MI were removed from the stroke and PAOD cohorts before testing for association. A significant association of the A4 haplotype to stroke was observed, with a relative risk of 1.67 (P value=0.000095). In addition, it was determined whether the A4 haplotype was primarily associated with a particular sub-phenotype of stroke, and found that both ischemic and hemorrhagic stroke were significantly associated with the A4 haplotype (Table 22).

TABLE 22
Association of the A4 haplotype to subgroups of stroke

| Phenotype (n) | Pat. Frq. | RR | PAR | P-value |
|---|---|---|---|---|
| Stroke^{a} (702) | 0.149 | 1.67 | 0.116 | 0.000095 |
| Ischemic (484) | 0.148 | 1.65 | 0.113 | 0.00053 |
| TIA (148) | 0.137 | 1.51 | 0.090 | 0.058 |
| Hemorrhagic (68) | 0.167 | 1.91 | 0.153 | 0.024 |

^{a}Excluding known cases of MI.

[0386] Finally, the A4 haplotype was less significantly associated with PAOD (Table 21). It should be noted that similar to the stronger association of the A4 haplotype to male MI compared to female MI, it also shows stronger association to male stroke and PAOD (Table 21).

### Study Population

[0387] The stroke and PAOD cohorts used in this study have previously been described (Gretarsdottir, S. et al. Nat Genet 35, 131-8 (2003); Gretarsdottir, S. et al., Am J Hum Genet 70, 593-603 (2002); Gudmundsson, G. et al., Am J Hum Genet 70, 586-92-(2002)). For the stroke linkage analysis, genotypes from 342 male patients with ischemic stroke or TIA-that were linked to at least one other male patient within and including 6 meioses in 164 families were used. For the association studies 702 patients with all forms of stroke (n=329 females and n=373 males) and 577 PAOD patients (n=221 females and n=356 males) were analysed. Patients with stroke or PAOD that also had MI were excluded. Controls used for the stroke and PAOD association studies were the same as used in the MI SNP association study (n=628).

[0388] The study was approved by the Data Protection Commission of Iceland and the National Bioethics Committee of Iceland. Informed consent was obtained from all study participants. Personal identifiers associated with medical information and blood samples were encrypted with a third party encryption system as previously described (Gulcher, J. R., Kristjansson, K., Gudbjartsson, H. & Stefansson, K.,. Eur J Hum Genet 8, 739-42 (2000)).

[0389] In addition, in an independent linkage study of male patients with ischemic stroke or transient ischemic attack, linkage to the same locus was observed with a LOD score of 1.51 at the same peak marker (FIG. 7), further suggested that a cardiovascular susceptibility factor might reside at this locus.

### EXAMPLE 9

### Haplotype Association to FLAP in a British Cohort

[0390] In an independent study, it was determined whether variants in the FLAP gene also have impact on risk of MI in a population outside Iceland. The four SNPs, defining the A4 haplotype, were typed in a cohort of 750 patients from the United Kingdom who had sporadic MI, and in 728 British population controls. The patients and controls come from 3 separate study cohorts recruited in Leicester and Sheffield. No significant differences were found in the frequency of the haplotype between patients and controls (16.9% versus 15.3%, respectively). However, when an. additional 9 SNPs, distributed across the FLAP gene, were typed in the British cohort and searched for other haplotypes that might be associated with MI, two SNPs showed association to MI with a nominally significant P value (data not shown). Moreover, three and four SNP haplotype combinations increased the risk of MI in the British cohort further and the most significant association was observed for a four SNP haplotype with a nominal P value=0.00037 (Table 23).

TABLE 23
Association of the HapB haplotype to British MI patients

| Phenotype (n) | Frq. Pat. | RR | PAR | P-value | P-value^{a} |
|---|---|---|---|---|---|
| MI (750) | 0.075 | 1.95 | 0.072 | 0.00037 | 0.046 |
| Males (546) | 0.075 | 1.97 | 0.072 | 0.00093 | ND |
| Females (204) | 0.073 | 1.90 | 0.068 | 0.021 | ND |
| ^{a}P value adjusted for the number of haplotypes tested using 1,000 randomization tests. | | | | | |
| Shown are the results for HapB that shows the strongest association in British MI cohort. HapB is defined by the following SNPs: SG13S377, SG13S114, SG13S41 and SG13S35 (that have the following alleles A, A, A and G, respectively. In all three phenotypes shown the same set of n = 728 British controls is used and the frequency of HapB in the | | | | | |
| # control cohort is 0.040. Number of patients (n), haplotype frequency in patients (Frq. pat.), relative risk (RR) and population attributed risk (PAR). | | | | | |

[0391] This was called haplotype HapB. The haplotype frequency of HapB is 7.5% in the MI patient cohort (carrier frequency 14.4%), compared to 4.0% (carrier frequency 7.8%) in controls, conferring a relative risk of 1.95 (Table 23). This haplotype remained significant after adjusting for all haplotypes tested, using 1000 randomisation steps, with an adjusted P value=0.046. No other SNP haplotype had an adjusted P value less than 0.05. The two at-risk haplotypes A4 and HapB appear to be mutually exclusive with no instance where the same chromosome carries both haplotypes.

[0392] British Study Population

[0393] The method of recruitment of 3 separate cohorts of British subjects has been described previously (Steeds, R., Adams, M., Smith, P., Channer, K. & Samani, N. J., Thromb Haemost 79, 980-4 (1998); Brouilette, S., Singh, R. K., Thompson, J. R., Goodall, A. H. & Samani, N. J., Arterioscler Thromb Vasc Biol 23, 842-6 (2003)). In brief, in the first two cohorts a total of 547 patients included those who were admitted to the coronary care units (CCU) of the Leicester Royal Infirmary, Leicester (July 1993-April 1994) and the Royal Hallamshire Hospital, Sheffield (November 1995-March 1997) and satisfied the World Health Organisation criteria for acute MI in terms of symptoms, elevations in cardiac enzymes or electrocardiographic changes (Nomenclature and criteria for diagnosis of ischemic heart disease. Report of the Joint International Society and Federation of Cardiology/World Health Organization task force on standardization of clinical nomenclature. Circulation 59, 607-9 (1979)). A total of 530 control subjects were recruited in each hospital from adult visitors to patients with non-cardiovascular disease on general medical, surgical, orthopaedic and obstetric wards to provide subjects likely to be representative of the source population from which the subjects originated. Subjects who reported a history of coronary heart disease were excluded.

[0394] In the third cohort, 203 subjects were recruited retrospectively from the registries of 3 coronary care units in Leicester. All had suffered an MI according to WHO criteria before the age of 50 years. At the time of participation, patients were at least 3 months from the acute event. The control cohort comprised 180 subjects with no personal or family history of premature coronary heart disease, matched for age, sex, and current smoking status with the cases. Control subjects were recruited from 3 primary care practices located within the same geographical area. In all cohorts subjects were white of Northern European origin.

### Discussion

[0395] These results show that variants of the gene encoding FLAP associate with increased risk of MI and stroke. In the Icelandic cohort, a haplotype that spans the FLAP gene is carried by 30% of all MI patients and almost doubles the risk of MI. These findings were subsequently replicated in an independent cohort of stroke patients. In addition, another haplotype that spans the FLAP gene is associated with MI in a British cohort. Suggestive linkage to chromosome 13q12-13 was observed with several different phenotypes, including female MI, early onset MI of both sexes, and ischemic stroke or TIA in males. However, surprisingly, the strongest haplotype association was observed to males with MI or stroke. Therefore, there may be other variants or haplotypes within the FLAP gene, or in other genes within the linkage region, that also may confer risk to these cardiovascular phenotypes.

[0396] These data also show that the at-risk haplotype of the FLAP gene has increased frequency in all subgroups of stroke, including ischemic, TIA, and hemorrhagic stroke. Of interest is that the A4 haplotype confers significantly higher risk of MI and stroke than it does of PAOD. This could be explained by differences in the pathogenesis of these diseases. Unlike PAOD patients who have ischemic legs because of atherosclerotic lesions that are responsible for gradually diminishing blood flow to the legs, the MI and stroke patients have suffered acute events, with disruption of the vessel wall suddenly decreasing blood flow to regions of the heart and the brain.

[0397] Association was not found between the A4 haplotype and MI in a British cohort. However, significant association to MI was found with a different variant spanning the FLAP gene. The fact that different haplotypes of the gene are found conferring risk to MI in a second population is not surprising. A common disease like MI associates with many different mutations or sequence variations, and the frequencies of these disease associated variants may differ between populations. Furthermore, the same mutations may be seen arising on different haplotypic backgrounds.

[0398] In summary, it has been found that: MI correlates with genetic variation at FLAP; MI correlates with high expression promoter polymorphism at 5-LO; patients with female MI at-risk FLAP haplotypes have higher levels of serum LTE4; LTE4 levels correlate with CRP levels in serum; and patients with MI at-risk FLAP haplotypes have elevated CRP. In addition, we have shown that isolated neutrophils from MI patients, produce more LTB4 when stimulated with ionomycin compared to controls. Taken together, these results show that increased leukotriene synthesis is a risk factor for MI, and that this risk is driven in part by variants in FLAP and 5-LO genes and are captured in part by measurement of levels of serum LTE4 and CRP. Furthermore, the SNP haplotype in the FLAP gene that confers risk to MI also confers risk of stroke and/or PAOD.

### Markers Utilized Herein

[0399] TABLE 24

Basepair position of microsatellite markers (start and stop of the
amplimersin NCBI sequence assembly build 34 and primer sequences (forward
and reverse).

| | | | | |
|---|---|---|---|---|
| | | | basepair | basepair |
| Marker | | | start | stop |
| name | forward primer | reverse primer | position | position |

| | | | | |
|---|---|---|---|---|
| DG13S2393 | CCTTTGCTTTGTTCCTATTTCTTT | TCCCATTGCCCAGAGTTAAT | 22831401 | 22831787 |
| | (SEQ ID NO. 4) | (SEQ ID NO. 5) | | |
| DG13S2070 | TCCTCATGTCTTCACCTAGAAGC | CCACTCATGAGGGAGCTGTT | 23020439 | 23020651 |
| | (SEQ ID NO. 6) | (SEQ ID NO. 7) | | |
| DG13S2071 | TGTCACAGGCACACACTCTCT | GAGTATGGCTGCTGCTCCTC | 23066973 | 23067076 |
| | (SEQ ID NO. 8) | (SEQ ID NO. 9) | | |
| DG13S2072 | ATGGCTCACACTGGCCTAAA | TGAACAGACCAATAATAGTGCAG | 23136964 | 23137114 |
| | (SEQ ID NO. 10) | (SEQ ID NO. 11) | | |
| DG13S2078 | AAGCCACCCTTTAAACAGCA | GCTGAGGAAGCAACTCCACT | 23591927 | 23592081 |
| | (SEQ ID NO. 12) | (SEQ ID NO. 13) | | |
| DG13S2079 | GCTCTGAATTCCCTGGCATA | TTAGCCCTAGTCCCACTCTCC | 23646974 | 23647183 |
| | (SEQ ID NO. 14) | (SEQ ID NO. 15) | | |
| DG13S2082 | CAAGAGGCCTGCATAAGGAA | AGATTGCCGGTGGCTTAAAT | 23807898 | 23808174 |
| | (SEQ ID NO. 16) | (SEQ ID NO. 17) | | |
| DG13S2083 | TGTCTGTTCCCGTCTGTCTG | TTCATCCTCTGCCAAATTCC | 23882291 | 23882532 |
| | (SEQ ID NO. 18) | (SEQ ID NO. 19) | | |
| DG13S2086 | GGCATGTATTCACTGCCTGA | AAACCCATTCTTCTTCCTCTTAC | 24069346 | 24069771 |
| | (SEQ ID NO. 20) | (SEQ ID NO. 21) | | |
| DG13S2089 | TATGTGTTCAGCCCAGACCTC | CCCTGCCATGTGCATTTAC | 24274920 | 24275129 |
| | (SEQ ID NO. 22) | (SEQ ID NO. 23) | | |
| DG13S44 | CATTTCGGAAGGCAAAGAAA | TTGCAATGAGGAATGAAGCA | 24413148 | 24413382 |
| | (SEQ ID NO. 24) | (SEQ ID NO. 25) | | |
| DG13S2095 | TCCATTATCCATCTGTTCATTCA | GAAGAATTAATTGTAGGAGGCAA | 24621830 | 24622121 |
| | (SEQ ID NO. 26) | GA (SEQ ID NO. 27) | | |
| DG13S46 | CTGACATCACCACATTGATCG | CATACACAGCCATGTGGAATTA | 24652046 | 24652291 |
| | (SEQ ID NO. 28) | (SEQ ID NO. 29) | | |
| DG13S2101 | ACGGTGATGACGCCTACATT | TCACATGGACCAATTACCTAGAA | 24863557 | 24863744 |
| | (SEQ ID NO. 30) | (SEQ ID NO. 31) | | |
| D13S1254 | AAATTACTTCATCTTGACGATAA | CTATTGGGGACTGCAGAGAG | 25316434 | 25316657 |
| | CA (SEQ ID NO. 32) | (SEQ ID NO. 33) | | |
| DG13S55 | AGCCAGTGTCCACAAGGAAGGAGG | GTGAGACACATCTCTGG | 25337471 | 25337753 |
| | (SEQ ID NO. 34) | (SEQ ID NO. 35) | | |
| DG13S54 | AATCGTGCCTCAGTTCCATC | CCACCAGGAACAACACACAC | 25377308 | 25377463 |
| | (SEQ ID NO. 36) | (SEQ ID NO. 37) | | |
| D13S625 | TTGCTCTCCAGCCTGGGC | TTCCTCTGGCTGCCTGCG | 25391207 | 25391395 |
| | (SEQ ID NO. 38) | (SEQ ID NO. 39) | | |
| DG13S2695 | TCCTGCATGAGAAGGAACTG | CGACATTCACTGTGGCTCTT | 25415551 | 25415807 |
| | (SEQ ID NO. 40) | (SEQ ID NO. 41) | | |
| DG13S1479 | TTTGATTCCGTGGTCCATTA | TTATTTGGTCGGTGCACCTTT | 25459039 | 25459368 |
| | (SEQ ID NO. 42) | (SEQ ID NO. 43) | | |
| DG13S2696 | GGTGCACCGACCAAATAAGT | CCAGCTTATTCTCTCTGCCTTC | 25459351 | 25459478 |
| | (SEQ ID NO. 44) | (SEQ ID NO. 45) | | |
| DG13S1440 | GGTAGGTTGAAATGGGCTAACA | TCATGACAAGGTGTTGGATTT | 25520858 | 25520987 |
| | (SEQ ID NO. 46) | (SEQ ID NO. 47) | | |
| DG13S1890 | CCTCCTCTGCCATGAAGCTA | CTATTTGGTCTGCGGGTTGT | 25672727 | 25673140 |
| | (SEQ ID NO. 48) | (SEQ ID NO. 49) | | |
| DG13S1540 | TACTGGGTTATCGCCTGACC | CCAATGGACCTCTTGGACAT | 25704358 | 25704504 |
| | (SEQ ID NO. 50) | (SEQ ID NO. 51) | | |
| DG13S59 | TTTCGGCACAGTCCTCAATA | CAGCTGGGTGTGGTGACAT | 25720194 | 25720421 |
| | (SEQ ID NO. 52) | (SEQ ID NO. 53) | | |
| DG13S1545 | CAGAGAGGAACAGGCAGAGG | AGTGGCTGGGAAGCCTTATT | 25760018 | 25760404 |
| | (SEQ ID NO. 54) | (SEQ ID NO. 55) | | |
| DG13S1524 | AGGTGAGAGAACAAACCTGTCTT | GCCTTCCTTCTAAGGCCAAC | 25843657 | 25843768 |
| | (SEQ ID NO. 56) | (SEQ ID NO. 57) | | |
| DG13S1529 | CTGTAGACTTTATCCCTGACTTAC | CAATGAATGATGAAGATTCCACT | 26098943 | 26099063 |
| | TG (SEQ ID NO. 58) | C (SEQ ID NO. 59) | | |
| DG13S1908 | TGACACCATGTCTTACTGTTGC | GAGGATACAATGAGAACCAAATC | 26110282 | 26110493 |
| | (SEQ ID NO. 60) | TC (SEQ ID NO. 61) | | |
| DG13S2525 | CAGGATCATCAGCCAGGTTT | GCTGCATGTCACTAGGCATT | 26123233 | 26123381 |
| | (SEQ ID NO. 62) | (SEQ ID NO. 63) | | |
| DG13S1546 | CCACAGAATGCTCCAAAGGT | GAGTTCAAGTGATGGATGACGA | 26159644 | 26159995 |
| | (SEQ ID NO. 64) | (SEQ ID NO. 65) | | |
| DG13S1444 | CAGATAGATGAATAGGTGGATGG | CACTGTTCCAAGTGCTTTGC | 26207544 | 26207727 |
| | A (SEQ ID NO. 66) | (SEQ ID NO. 67) | | |
| DG13S66 | TATGCGTTGTGTGTGCTGTG | GGGCCTTAGATTCTTGTAGTGG | 26279746 | 26279962 |
| | (SEQ ID NO. 68) | (SEQ ID NO. 69) | | |
| DG13S1907 | TGTCCAGACTGCCTCCTACA | TGCAACACCTGGTTCACAAT | 26378401 | 26378521 |
| | (SEQ ID NO. 70) | (SEQ ID NO. 71) | | |
| DG13S68 | TTTGCGAGTCCTTGTGGAGT | ACAGTCCGCTCCCTCCTAAT | 26511587 | 26511825 |
| | (SEQ ID NO. 72) | (SEQ ID NO. 73) | | |
| DG13S69 | ATGCTTGGCCCTCAGTTT | TTGGCAACCCAAGCTAATATG | 26518188 | 26518483 |
| | (SEQ ID NO. 74) | (SEQ ID NO. 75) | | |
| D13S1250 | CTCCACAGTGACAGTGAGG | GAGAGGTTCCCAATCCC | 26721525 | 26721686 |
| | (SEQ ID NO. 76) | (SEQ ID NO. 77) | | |
| DG13S574 | CAGCTCCTGGCCATATTTCT | GAGCCATTTCTCTGGGTCTG | 26853541 | 26853693 |
| | (SEQ ID NO. 78) | (SEQ ID NO. 79) | | |
| DG13S73 | GGTCCGTGTCAACCCTTAGA | CAGGTTGATGGGAGGGAAA | 26878938 | 26879133 |
| | (SEQ ID NO. 80) | (SEQ ID NO. 81) | | |
| DG13S1532 | CGGGAAATGACAGTGAGACC | TGCCTAGATTCTCCCGTAAG | 26899505 | 26899652 |
| | (SEQ ID NO. 82) | (SEQ ID NO. 83) | | |
| D13S1242 | GTGCCCAGCCAGATTC | GCCCCCAGTCAGGTTT | 26943073 | 26943316 |
| | (SEQ ID NO. 84) | (SEQ ID NO. 85) | | |
| DG13S576 | TTTCTCTCTCCACGGAATGAA | AACCCATTCTCACAGGGTGTA | 27121599 | 27121797 |
| | (SEQ ID NO. 86) | (SEQ ID NO. 87) | | |
| DG13S1917 | AGGAGTGTGGCAGCTTGAG | TGGATTCCCGTGAGTACCAG | 27135092 | 27135232 |
| | (SEQ ID NO. 88) | (SEQ ID NO. 89) | | |
| D13S217 | ATGCTGGGATCACAGGC | AACCTGGTGGACTTTTGCT | 27169880 | 27170051 |
| | (SEQ ID NO. 90) | (SEQ ID NO. 91) | | |
| DG13S581 | AGCATTTCCAATGGTGCTTT | CATGTTGATATGCCTGAAGGA | 27318359 | 27318725 |
| | (SEQ ID NO. 92) | (SEQ ID NO. 93) | | |
| DG13S1471 | CACTGTCTGCTGCCACTCAT | AGAGATTATGTGATGTACCCTCTC | 27403303 | 27403544 |
| | (SEQ ID NO. 94) | TAT (SEQ ID NO. 95) | | |
| DG13S2505 | TGATGAAGATCTGGGCGTTA | TGCCTGTGCTCACTCACTCT | 27493479 | 27493626 |
| | (SEQ ID NO. 96) | (SEQ ID NO. 97) | | |
| D13S120 | ATGACCTAGAAATGATACTGGC | CAGACACCACAACACACATT | 27540983 | 27541093 |
| | (SEQ ID NO. 98) | (SEQ ID NO. 99) | | |
| D13S1486 | TGGTTTAAAAACCTCATGCC | ATCCCAAACTCTGTACTTATGTAG | 27623349 | 27623496 |
| | (SEQ ID NO. 100) | G(SEQ ID NO. 101) | | |
| DG13S1495 | CCTTGGCTGTTGTGACTGGT | CACTCAGGTGGGAGGATCAC | 27668199 | 27668471 |
| | (SEQ ID NO. 102) | (SEQ ID NO. 103) | | |
| DG13S1845 | CACTTTTGCCAGTAGCCTTGA | TTGGGAAAGTTAACCCAGAGA | 27788787 | 27789056 |
| | (SEQ ID NO. 104) | (SEQ ID NO. 105) | | |
| DG13S1030 | TTTGGGAAGAGCCATGAGAC | CTCTGGGCATTGGAGGATTA | 27872811 | 27873164 |
| | (SEQ ID NO. 106) | (SEQ ID NO. 107) | | |
| DG13S584 | GGGAGACAAGTCAGGTGAGG | CTGAGTATGGAGTCTTCATCATTA | 27924334 | 27924484 |
| | (SEQ ID NO. 108) | TC (SEQ ID NO. 109) | | |
| DG13S79 | TGCTACTAGATTTGACCAACCA | GACTTGTAAAGGATTTAGTGATTT | 28213368 | 28213495 |
| | (SEQ ID NO. 110) | CG(SEQ ID NO. 111) | | |
| DG13S80 | GTGGAAGGCCTCTCTCTGTG | TGCTTCTTGAGGGAAAGCAT | 28297121 | 28297353 |
| | (SEQ ID NO. 112) | (SEQ ID NO. 113) | | |
| DG13S1934 | CCTTCAGAGGATTTCCCTTTC | CTGGTTTGACTCCAGCTTCA | 28461787 | 28462194 |
| | (SEQ ID NO. 114) | (SEQ ID NO. 115) | | |
| DG13S1104 | CCTGGCACGGAATAGACACT | GGCCTCCTTTGCTCTGAAG | 28497694 | 28498071 |
| | (SEQ ID NO. 116) | (SEQ ID NO. 117) | | |
| DG13S1097 | CATCCCTGTGGCTGATTAAGA | AACAGTTCCAGCCCGTTCTA | 28532382 | 28532543 |
| | (SEQ ID NO. 118) | (SEQ ID NO. 119) | | |
| DG13S1110 | TTTCAAAGGAATATCCAAGTGC | TGGCGTACCATATAAACAGTTCTC | 28547636 | 28547900 |
| | (SEQ ID NO. 120) | (SEQ ID NO. 121) | | |
| DG13S87 | TTCAATGAAGGTGCCGAAGT | TGTCTATCCCAAAGCTGCAA | 28597688 | 28597905 |
| | (SEQ ID NO. 122) | (SEQ ID NO. 123) | | |
| DG13S2400 | GCTCAGTCCAAGTTCATGCTC | TGGGATTGGGTTCTGGATAC | 28671947 | 28672231 |
| | (SEQ ID NO. 124) | (SEQ ID NO. 125) | | |
| DG13S3114 | CCTACTTTTCCATCTCCTCCTTG | TGGAGTAAGTTGGAGAATTGTTG | 28678081 | 28678248 |
| | (SEQ ID NO. 126) | A(SEQ ID NO. 127) | | |
| DG13S1111 | GCAAGACTCTGTTGAAGAAGAAG | TCCCTCTGTTTGAGTTTCTCG | 28760422 | 28760531 |
| | A (SEQ ID NO. 128) | (SEQ ID NO. 129) | | |
| DG13S3122 | CCTTGGGCAGTCAGAGAAAC | CCCGTGAAGTCTGAGAGGTG | 28778662 | 28778906 |
| | (SEQ ID NO. 130) | (SEQ ID NO. 131) | | |
| DG13S1101 | AGGCACAGTCGCTCATGTC | AAACTTTAGCTAATGGTGGTCAA | 28812542 | 28812874 |
| | (SEQ ID NO. 132) | A (SEQ ID NO. 133) | | |
| D13S1246 | GAGCATGTGTGACTTTCATATTC | AGTGGCTATTCATTGCTACAGG | 28903534 | 28903738 |
| | AG (SEQ ID NO. 134) | (SEQ ID NO. 135) | | |
| DG1351103 | TTGCTGGATGCTGGTTTCTA | AAAGAGAGAGAGAAAGAGAAAG | 28910502 | 28910765 |
| | (SEQ ID NO. 136) | AAAGA (SEQ ID NO. 137) | | |
| DG1353147 | AAAGTGGATGCAGTTTGAGGTTT | GCTAGCCATTACAGACAACCAA | 29018341 | 29018591 |
| | (SEQ ID NO. 138) | (SEQ ID NO. 139) | | |
| DG13S3150 | CAGGGCTCCATGTATCCATAA | CAATCTTTGGCTTTGGGTTT | 29042766 | 29042948 |
| | (SEQ ID NO. 140) | (SEQ ID NO. 141) | | |
| D13S289 | CTGGTTGAGCGGCATT | TGCAGCCTGGATGACA | 29063702 | 29063949 |
| | (SEQ ID NO. 142) | (SEQ ID NO. 143) | | |
| DG13S166 | CCTATGGAAGCATAGGGAAGAA | CCCACTTCTGAGTCTCCTGAT | 29064359 | 29064753 |
| | (SEQ ID NO. 144) | (SEQ ID NO. 145) | | |
| DG13S3156 | GGGAAATGGAGCTGCTGTTAT | GAGTGGGTGAGTGCAAGGAT | 29111037 | 29111416 |
| | (SEQ ID NO. 146) | (SEQ ID NO. 147) | | |
| D13S1238 | CTCTCAGCAGGCATCCA | GCCAACGTAATTGACACCA | 29144427 | 29144579 |
| | (SEQ ID NO. 148) (SEQ ID NO. 149) | | | |
| DG13S2605 | TGAAAGGAAGGTCCCTGAGTT | CCCTGCTTTGCACAAGTTATC | 29145896 | 29146055 |
| | (SEQ ID NO. 150) | (SEQ ID NO. 151) | | |
| DG13S163 | CACATGAGGCTGTATGTGGA | TGTGCAGGAATGAGAAGTCG | 29177152 | 29177313 |
| | (SEQ ID NO. 152) | (SEQ ID NO. 153) | | |
| D13S290 | CCTTAGGCCCCATAATCT | CAAATTCCTCAATTTGCAAAAT | 29227323 | 29227512 |
| | (SEQ ID NO. 154) | (SEQ ID NO. 155) | | |
| D13S1229 | GGTCATTCAGGGAGCCATTC | CCATTATATTTCACCAAGAGGCTG | 29282262 | 29282396 |
| | SEQ ID NO. 156) | C SEQ ID NO. 157) | | |
| DG13S2358 | AGTCAAGGCTGACAGGGAAG | GCTCTCAGCCCTCAATGTGT | 29342275 | 29342399 |
| | (SEQ ID NO. 158) | (SEQ ID NO. 159) | | |
| DG13S2658 | ATTTGGGTTCCTCTCCCAAT | ACAAACTCTTGCTGCTGGTG | 29348162 | 29348426 |
| | (SEQ ID NO. 160) | (SEQ ID NO. 161) | | |
| DG13S1460 | TGCCTGGTCATCTACCCATT | TCTACTGCAGCGCTGATCTT | 29389048 | 29389297 |
| | (SEQ ID NO. 162) | (SEQ ID NO. 163) | | |
| DG13S2434 | TCCTTCCAGAAGGTTTGCAT | TGCAAAGTTGTTCAAGAGAGACA | 29485254 | 29485392 |
| | (SEQ ID NO. 164) | (SEQ ID NO. 165) | | |
| DG13S1448 | CAGCAGGAAGATGGACAGGT | CACACTGCATCACACATACCC | 29499404 | 29499531 |
| | (SEQ ID NO. 166) | (SEQ ID NO. 167) | | |
| D13S1287 | TATGCCAGTATGCCTGCT | GTCACATCAGTCCATTTGC | 29513830 | 29514063 |
| | (SEQ ID NO. 168) | (SEQ ID NO. 169) | | |
| DG13S2665 | GGTTTATGTCTGTGTGTGTGTGC | TGAGGGATGTCAGAGAAATATGC | 29747845 | 29747984 |
| | (SEQ ID NO. 170) | (SEQ ID NO. 171) | | |
| DG13S1904 | TGATGAAATTGCCTAGTGATGC | GGATCCAATCGTAGGCTACC | 29767797 | 29767922 |
| | (SEQ ID NO. 172) | (SEQ ID NO. 173) | | |
| DG13S1490 | ACCTAAACACCACGGACTGG | CAGGTATCGACATTCTTCCAAA | 29908555 | 29908958 |
| | (SEQ ID NO. 174) | (SEQ ID NO. 175) | | |
| DG13S2637 | GGTGATCTAGGGAATTATTTGTC | TTGGCCACTAAGGTCCAGAT | 29941956 | 29942120 |
| | TTC (SEQ ID NO. 176) | (SEQ ID NO. 177) | | |
| DG13S96 | CCTTTGAGGCTGGATCTGTT | TTTCCTTATCATTCATTCCCTCA | 30166433 | 30166650 |
| | (SEQ ID NO. 178) | (SEQ ID NO. 179) | | |
| D13S260 | AGATATTGTCTCCGTTCCATGA | CCCAGATATAAGGACCTGGCTA | 30234833 | 30234997 |
| | (SEQ ID NO. 180) | (SEQ ID NO. 181) | | |
| DG13S17 | TTTTAAGCCCTGTGGAATGTATTT | GACATTGCAGGTCAAGTAGGG | 30288392 | 30288544 |
| | (SEQ ID NO. 182) | (SEQ ID NO. 183) | | |
| DG13S306 | TGCATAAGGCTGGAGACAGA | CACAGCAGATGGGAGCAAA | 30404049 | 30404203 |
| | (SEQ ID NO. 184) | (SEQ ID NO. 185) | | |
| DG13S2486 | AGCCAGTTGTCTTTCATCCTG | TGCCTGTGCTTGTATATTCTGTG | 30411508 | 304TT55 |
| | (SEQ ID NO. 186) | (SEQ ID NO. 187) | | |
| DG13S18 | GTGCATGTGCATACCAGACC | GGCAAGATGACCTCTGGAAA | 30456875 | 30457193 |
| | (SEQ ID NO. 188) | (SEQ ID NO. 189) | | |
| DG13S1062 | TTTGTGTTCCAGGTGAGAATTG | GAACCATATCCCAAGGCACT | 30551596 | 30551715 |
| | (SEQ ID NO. 190) | (SEQ ID NO. 191) | | |
| DG13S1093 | TTGTTCCCACATTCATTCTACA | TTAAACTCGTGGCAAAGACG | 30625918 | 30626190 |
| | (SEQ ID NO. 192) | (SEQ ID NO. 193) | | |
| DG13S1059 | CACCATGCCTGGCTCTTT | AACTTCTCCAGTTGTGTGGTTG | 30822917 | 30823246 |
| | (SEQ ID NO. 194) | (SEQ ID NO. 195) | | |
| D13S171 | CCTACCATTGACACTCTCAG | TAGGGCCATCCATTCT | 31051937 | 31052167 |
| | (SEQ ID NO. 196) | (SEQ ID NO. 197) | | |
| DG13S2359 | TCTGTGTGTATTGTGTACTCCTCT | TCACACAATTTGAACCAATCCT | 31073673 | 31073849 |
| | G (SEQ ID NO. 198) | (SEQ ID NO. 199) | | |
| DG13S1092 | ACCAAGATATGAAGGCCAAA | CCTCCAGCTAGAACAATGTGAA | 31113759 | 31113934 |
| | (SEQ ID NO. 200) | (SEQ ID NO. 201) | | |
| DG13S2629 | TGATCATGTCAGCAGCAGAAG | AGTAACAGGTGAGGGCATGG | 3TT9791 | 3TT9953 |
| | (SEQ ID NO. 202) | (SEQ ID NO. 203) | | |
| DG13S1449 | TGTCCATAGCTGTAGCCCTGT | CTCAATGGGCATCTTTAGGC | 31199228 | 31199498 |
| | (SEQ ID NO. 204) | (SEQ ID NO. 205) | | |
| DG13S312 | CAAACAAACAAACAAGCAAACC | TGGACGTTTCTTTCAGTGAGG | 31280202 | 31280550 |
| | (SEQ ID NO. 206) | (SEQ ID NO. 207) | | |
| DG13S1511 | TGATAACTTACCAGCATGTGAGC | TCACCTCACCTAAGGATCTGC | 31321562 | 31321854 |
| | (SEQ ID NO. 208) | (SEQ ID NO. 209) | | |
| DG13S2454 | GCTAGCAAATCTCTCAACTTCCA | TCTTCTCCATGCTGCTTCCT | 31352662 | 31352803 |
| | (SEQ ID NO. 210) | (SEQ ID NO. 211) | | |
| DG13S314 | CATGCAATTGCCCAATAGAG | TTGGGCTTGTCTACCTAGTTCA | 31379760 | 31380086 |
| | (SEQ ID NO. 212) | (SEQ ID NO. 213) | | |
| DG13S1071 | GCTGCACGTATTTGTTGGTG | AAACAGCAGAAATGGGAACC | 31447431 | 31447669 |
| | (SEQ ID NO. 214) | (SEQ ID NO. 215) | | |
| DG13S1068 | CCGTGGGCTATCAATTTCTG | AAGATGCAATCTGGTTCCAA | 31553333 | 31553570 |
| | (SEQ ID NO. 216) | (SEQ ID NO. 217) | | |
| DG13S1077 | CCCAAGACTGAGGAGGTCAA | GCTGACGGAGAGGAAAGAGA | 31569360 | 31569733 |
| | (SEQ ID NO. 218) | (SEQ ID NO. 219) | | |
| DG13S2343 | TCACAAAGCAAGCAATCACA | TGATGGATGCACCATGTTA | 31653489 | 31653608 |
| | (SEQ ID NO. 220) | (SEQ ID NO. 221) | | |
| DG13S316 | TGAGAAGCCTGGGCATTAAG | ACAAGCTCATCCAGGGAAAG | 31708002 | 31708244 |
| | (SEQ ID NO. 222) | (SEQ ID NO. 223) | | |
| DG13S1558 | AGAGCTGATCTGGCCGAAG | GGTGGACACAGAATCCACACT | 31986248 | 31986627 |
| | (SEQ ID NO. 224) | (SEQ ID NO. 225) | | |
| D13S267 | GGCCTGAAAGGTATCCTC | TCCCACCATAAGCACAAG | 32062233 | 32062380 |
| | (SEQ ID NO. 226) | (SEQ ID NO. 227) | | |
| DG13S1478 | TCAACCTAGGATTGGCATTACA | TCTAGGATTTGTGCCTTTCCA | 32157761 | 32158137 |
| | (SEQ ID NO. 228) | (SEQ ID NO. 229) | | |
| DG13S1551 | ATTCGTGCAGCTGTTTCTGC | GCATGACATTGTAAATGGAGGA | 32364898 | 32365153 |
| | (SEQ ID NO. 230) | (SEQ ID NO. 231) | | |
| DG13S1884 | GGTGGGAATGTGTGACTGAA | CCAGGTACAACATTCTCCTGAT | 32451203 | 32451315 |
| | (SEQ ID NO. 232) | (SEQ ID NO. 233) | | |
| D13S1293 | TGCAGGTGGGAGTCAA | AAATAACAAGAAGTGACCTTCCT | 32536337 | 32536467 |
| | (SEQ ID NO. 234) | A (SEQ ID NO. 235) | | |
| DG13S1518 | AAAGGATGCATTCGGTTAGAG | ACTGTCCTGTGCCTGTGCTT | 32588965 | 32589321 |
| | (SEQ ID NO. 236) | (SEQ ID NO. 237) | | |
| D13S620 | GTCCACCTAATGGCTCATTC | CAAGAAGCACTCATGTTTGTG | 32627749 | 32627947 |
| | (SEQ ID NO. 238) | (SEQ ID NO. 239) | | |
| DG13S1866 | AGCCTGTGATTGGCTGAGA | GGCTTACAGCTGCCTCCTTT | 32633306 | 32633709 |
| | (SEQ ID NO. 240) | (SEQ ID NO. 241) | | |
| DG13S1927 | CCCACAGAGCACTTTGTTAGA | GCCTCCCTTAAGCTGTTATGC | 32691932 | 32692304 |
| | (SEQ ID NO. 242) | (SEQ ID NO. 243) | | |
| DG13S1503 | CACTCTTTACTGCCAATCACTCC | GCCGTGTGGGTGTATGAAT | 32699827 | 32700058 |
| | (SEQ ID NO. 244) | (SEQ ID NO. 245) | | |
| DG13S332 | TTGTACCAGGAACCAAAGACAA | CACAGACAGAGGCACATTGA | 32764576 | 32764751 |
| | (SEQ ID NO. 246) | (SEQ ID NO. 247) | | |
| DG13S333 | GCTCTGGTCACTCCTGCTGT | CATGCCTGGCTGATTGTTT | 32872275 | 32872720 |
| | (SEQ ID NO. 248) | (SEQ ID NO. 249) | | |
| D13S220 | CCAACATCGGGAACTG | TGCATTCTTTTAAGTCCATGTC | 32967602 | 32967793 |
| | (SEQ ID NO. 250) | (SEQ ID NO. 251) | | |
| DG13S1919 | CAGCAACTGACAACTCATCCA | CCTCAATCCTCAGCTCCAAC | 33014255 | 33014477 |
| | (SEQ ID NO. 252) | (SEQ ID NO. 253) | | |
| DG13S2383 | TGATTGGTTCTGTTGTTGCTG | AGCCCAAGGCTCTTTGTGAG | 33053369 | 33053553 |
| | (SEQ ID NO. 254) | (SEQ ID NO. 255) | | |
| DG13S1439 | TCCTTCACAGCTTCAAACTCA | AGTGAGAAGCTTCCATACTGGT | 33070030 | 33070264 |
| | (SEQ ID NO. 256) | (SEQ ID NO. 257) | | |
| DG13S335 | GCCAACCGTTAGACAAATGA | CTACATGTGCACCACAACACC | 33102278 | 33102478 |
| | (SEQ ID NO. 258) | (SEQ ID NO. 259) | | |
| DG13S340 | AGTTTATTGCCGCCGAGAG | ACCCACCACATTCACAAGC | 33124866 | 33125238 |
| | (SEQ ID NO. 260) | (SEQ ID NO. 261) | | |
| DG13S1496 | CGATTGCCATGTCTCTTGA | GAGATCTGGCCTGGATTTGT | 33215915 | 33216066 |
| | (SEQ ID NO. 262) | (SEQ ID NO. 263) | | |
| DG13S347 | TCATTGTCAGCACAGAATGAACT | GGAGGGAGGGAAGAAAGAGA | 33280351 | 33280688 |
| | (SEQ ID NO. 264) | (SEQ ID NO. 265) | | |
| DG13S339 | GGGAAGAGGAGATTGACTTGTT | GGAACACCATCATTCCAACC | 33352425 | 33352656 |
| | (SEQ ID NO. 266) | (SEQ ID NO. 267) | | |
| DG13S1926 | TACAAGCTCCACCGTCCTTC | TGAGTTGCTGCCTCTTCAAA | 33388692 | 33388919 |
| | (SEQ ID NO. 268) | (SEQ ID NO. 269) | | |
| DG13S1469 | TGCTAATGGGCCAAGGAATA | GCTAAATGTCCTCATGAATAGCC | 33416571 | 33416940 |
| | (SEQ ID NO. 270) | (SEQ ID NO. 271) | | |
| DG13S351 | TGTCCTGCAGACAGATGGTC | CCTCCGGAGTAGCTGGATTA | 33497762 | 33498055 |
| | (SEQ ID NO. 272) | (SEQ ID NO. 273) | | |
| DG13S26 | GAGACTGGCCCTCATTCTTG | AAGAAGCCAGAGACAAAGAAATA | 33584096 | 33584425 |
| | (SEQ ID NO. 274) | CA (SEQ ID NO. 275) | | |
| DG13S30 | CATCTATCTTGGATTCAGTGGTG | TGCTCCCAACATCTTACCAG | 33731684 | 33732071 |
| | (SEQ ID NO. 276) | (SEQ ID NO. 277) | | |
| DG13S1435 | TGTCCTCTGGTCATTTCTATGGT | CATGAATGAGAAGTGATGAATGG | 33762069 | 33762285 |
| | (SEQ ID NO. 278) | (SEQ ID NO. 279) | | |
| DG13S356 | CAGACACTGTAAACTGGCTTCG | CCACATTGCTATCAGCGTA | 33908746 | 33908957 |
| | (SEQ ID NO. 280) | (SEQ ID NO. 281) | | |
| DG13S2316 | ATGTGCTGTGGTCCAGATTT | CCTACTACTGCAATTACTCCCTAC | 33913787 | 33913954 |
| | (SEQ ID NO. 282) | C (SEQ ID NO. 283) | | |
| DG13S357 | TGTCATAGGCTGCGGTATT | TTGGTAGGGTCCTTTCCTTTT | 33935177 | 33935378 |
| | (SEQ ID NO. 284) | (SEQ ID NO. 285) | | |
| DG13S1032 | GCCTGCTCACTGTTGTTTGA | CGGTTATCAGAGACTGGTGGT | 33967059 | 33967269 |
| | (SEQ ID NO. 286) | (SEQ ID NO. 287) | | |
| DG13S1557 | GGCTTATTTCATGTACGGCTA | GGTTAAACTCTACTTAGTCCTGAT | 33996100 | 33996249 |
| | (SEQ ID NO. 288) | GC (SEQ ID NO. 289) | | |
| DG13S1925 | GAACTCTGCAGGCACCTCTT | CCTGAAGCGCTTGTACTGAA | 34079148 | 34079570 |
| | (SEQ ID NO. 290) | (SEQ ID NO. 291) | | |
| DG13S360 | TTGGCTTCTCGCTCTTTCTT | AGCCATCAGTCACATGCAAA | 34138872 | 34139221 |
| | (SEQ ID NO. 292) | (SEQ ID NO. 293) | | |
| DG13S1522 | AGATCTCCAGGGCAGAGGAC | CCTTCCTCCCTCCTTCTCTC | 34195314 | 34195659 |
| | (SEQ ID NO. 294) | (SEQ ID NO. 295) | | |
| DG13S2324 | CAGTCAAATGTCTCAACCTTCC | CTAGCAACATGGCCAAGAAA | 34224040 | 34224206 |
| | (SEQ ID NO. 296) | (SEQ ID NO. 297) | | |
| DG13S1517 | CGTCATTGATCCCAATCATCT | GGCTGATAGCCTCCCTTGTA | 34271358 | 34271587 |
| | (SEQ ID NO. 298) | (SEQ ID NO. 299) | | |
| DG13S364 | ACCTTCAAGCTTCCGGTTT | TTCCATCCGTCCATCTATCC | 34323307 | 34323478 |
| | (SEQ ID NO. 300) | (SEQ ID NO. 301) | | |
| DG13S1036 | TTAAAGTCACTTGTCTGTGGTCA | TTTGTAGGAATCAAGTCAAATAAT | 34525065 | 34525280 |
| | (SEQ ID NO. 302) | GTA (SEQ ID NO. 303) | | |
| DG13S1037 | CTTTCGGAAGCTTGAGCCTA | CCCAAGACCACTGCCATATT | 34616658 | 34616926 |
| | (SEQ ID NO. 304) | (SEQ ID NO. 305) | | |
| DG13S1854 | TGACAGGTTTGGGTATATTGGA | TGCTTAATGTAGTGGCAGCA | 34622055 | 34622151 |
| | (SEQ ID NO. 306) | (SEQ ID NO. 307) | | |
| DG13S1038 | TCCTGCCTTTGTGAATTCCT | GTTGAATGAGGTGGGCATTA | 34702405 | 34702738 |
| | (SEQ ID NO. 308) | (SEQ ID NO. 309) | | |
| DG13S2366 | TTGGGAATAAATCAGGTGTTGA | GCAGCAGCTCAGCATTTCTC | 34735455 | 34735583 |
| | (SEQ ID NO. 310) | (SEQ ID NO. 311) | | |
| DG13S1039 | CCATTTAATCCTCCAGCCATT | GCTCCACCTTGTTACCCTGA | 34743651 | 34743817 |
| | (SEQ ID NO. 312) | (SEQ ID NO. 313) | | |
| DG13S1840 | ACAACCCTGGAATCTGGACT | GAAGGAAAGGAAAGGAAAGAAA | 34805466 | 34805682 |
| | (SEQ ID NO. 314) | (SEQ ID NO. 315) | | |
| DG13S369 | TGACAAGACTGAAACTTCATCAG | GATGCTTGCTTGGGAGGTA | 34815499 | 34815755 |
| | (SEQ ID NO. 316) | (SEQ ID NO. 317) | | |
| DG13S2481 | CAGGTTAGAGCCCATCCAAG | AGGCTCAGCTTCATCCACAT | 34867728 | 34867872 |
| | (SEQ ID NO. 318) | (SEQ ID NO. 319) | | |
| D13S219 | AAGCAAATATGCAAAATTGC | TCCTTCTGTTTCTTGACTTAACA | 34956581 | 34956707 |
| | (SEQ ID NO. 320) | (SEQ ID NO. 321) | | |
| DG13S2351 | GGGAACAGGTCACAGGTCAT | GGAAGACTGGGTGGTCACAG | 35099146 | 35099320 |
| | (SEQ ID NO. 322) | (SEQ ID NO. 323) | | |
| DG13S384 | TTCCTTCTGCTTGTGAGCTG | TACCCTCACCTCCTCATGC | 35499548 | 35499763 |
| | (SEQ ID NO. 324) | (SEQ ID NO. 325) | | |
| DG13S1507 | GAAGACATTGGCAGGTCTGG | GAGCCCTCATGTTGGGATAA | 35557977 | 35558206 |
| | (SEQ ID NO. 326) | (SEQ ID NO. 327) | | |
| DG13S1512 | TTGTTGATTCTCCCATTCTGTG | TCACCTACCTCATCTCATACTCAA | 35668964 | 35669201 |
| | (SEQ ID NO. 328) | A (SEQ ID NO. 329) | | |
| DG13S1556 | TCTTCCGGACAAGTTTCCAA | TGGGTCATCTGGACATTCA | 35791215 | 35791467 |
| | (SEQ ID NO. 330) | (SEQ ID NO. 331) | | |
| DG13S388 | GCAAATGAGGCTGGTAAGGT | TGCACTGTGGTAGAGGGAAA | 35817061 | 35817320 |
| | (SEQ ID NO. 332) | (SEQ ID NO. 333) | | |
| DG13S1442 | CAACATACTCCTATGCCTAGAAA | CTCACCAGGCAGAAACAGGT | 35842967 | 35843335 |
| | GAAA (SEQ ID NO. 334) | (SEQ ID NO. 335) | | |
| DG13S1045 | CCCAATGGCATGCTTCACT | GGTTCTCCCAGCATTGGTT | 35928180 | 35928324 |
| | (SEQ ID NO. 336) | (SEQ ID NO. 337) | | |
| DG13S2452 | AAGGCCTCTGGGTAGGTAGG | AAGCAATCCTTATGGGCTCT | 35948528 | 35948826 |
| | (SEQ ID NO. 338) | (SEQ ID NO. 339) | | |
| DG13S2350 | CCAGGTAATCAGAAGCCTCA | TTCCGTTAAATCCAGCCATC | 36011840 | 36011961 |
| | (SEQ ID NO. 340) | (SEQ ID NO. 341) | | |
| DG13S2483 | CAGGGACTGCAGTGTCTCAA | ATGCCACATTTGCCTCTCTC | 36027396 | 36027703 |
| | (SEQ ID NO. 342) | (SEQ ID NO. 343) | | |
| DG13S1100 | CCACCTTCCACTTAATACAAACT | GAAGCAATCCATTCCAAGAAA | 36056838 | 36057115 |
| | TC (SEQ ID NO. 344) | (SEQ ID NO. 345) | | |
| DG13S1501 | GTCCTGAGGGTGTCCAGGTA | GCTGGAGAACTCCTATTCTGCT | 36215761 | 36215909 |
| | (SEQ ID NO. 346) | (SEQ ID NO. 347) | | |
| DG13S1868 | TGGAGCTATTGCGGTTCTCT | TCAAATCTCTCTTTCCTCCTCCT | 36313203 | 36313417 |
| | (SEQ ID NO. 348) | (SEQ ID NO. 349) | | |
| DG13S395 | CAGTTCCAGCTACGGGAGAA | CCGCATTTAGGCAAGTCTCA | 36317151 | 36317507 |
| | (SEQ ID NO. 350) | (SEQ ID NO. 351) | | |
| D13S1491 | AAGCACACACAGATGCTAGG | CCTCAGCCTCCATAATCTCA | 36361442 | 36361571 |
| | (SEQ ID NO. 352) | (SEQ ID NO. 353) | | |
| DG13S400 | GTACAGAGCCCACCTTCTGG | TCACTATGCTGCAAGGCAAG | 36369862 | 36370134 |
| | (SEQ ID NO. 354) | (SEQ ID NO. 355) | | |
| D13S894 | GGTGCTTGCTGTAAATATAATTG | CACTACAGCAGATTGCACCA | 36536509 | 36536706 |
| | (SEQ ID NO. 356) | (SEQ ID NO. 357) | | |
| D13S218 | GATTTGAAAATGAGCAGTCC | GTCGGGCACTACGTTTATCT | 36830331 | 36830519 |
| | (SEQ ID NO. 358) | (SEQ ID NO. 359) | | |
| DG13S1553 | TGGGTGAAGATGCTACCTGA | CCCTTCTTCCTTTCCCTCTC | 36898814 | 36899040 |
| | (SEQ ID NO. 360) | (SEQ ID NO. 361) | | |
| DG13S411 | TGCCAGGTCTGAGTTGTAAGC | CAGCATGAGACCCTGTCAAA | 36908058 | 36908265 |
| | (SEQ ID NO. 362) | (SEQ ID NO. 363) | | |
| DG13S1870 | GAAAGAAAGAAAGAAAGAAGAA | AATCACCAAACCTGGAAGCA | 36927423 | 36927632 |
| | AGAAA (SEQ ID NO. 364) | (SEQ ID NO. 365) | | |
| DG13S1870 | GAAAGAAAGAAAGAAAGAAGAA | AATCACCAAACCTGGAAGCA | 36927485 | 36927632 |
| | AGAAA (SEQ ID NO. 366) | (SEQ ID NO. 367) | | |
| DG13S39 | TCTGAGTTAAACACTTGAGTTGC | CCAGTAAATGGCAGTGTGGTT | 36957292 | 36957640 |
| | TG (SEQ ID NO. 368) | (SEQ ID NO. 369 | | |
| DG13S2415 | TGTCATGGATATTTCTACATAAA | TGAAGATGGTTATTGCTTCCTTC | 36984719 | 36984955 |
| | CCAA (SEQ ID NO. 370) | (SEQ ID NO. 371) | | |
| DG13S412 | CGCTTTGTTTGGTTTGGTTT | ATGCAGTTGTCCCACATGCT | 37036929 | 37037137 |
| | (SEQ ID NO. 372) | (SEQ ID NO. 373) | | |
| DG13S414 | TCCTGCACTCCAAAGGAAAC | AACTCTGGTTTAATTCAGCTTTGT | 37047489 | 37047713 |
| | (SEQ ID NO. 374) | C (SEQ ID NO. 375) | | |
| DG13S1872 | TTCTTGAGGGCATAAAGCTGA | CACACTCACCAGGCACTCTG | 37119505 | 37119608 |
| | (SEQ ID NO. 376) | (SEQ ID NO. 377) | | |
| DG13S416 | CAGGTTTGATGAAGGAAATATGC | GGGATCCTCTGCATTTCTCTAA | 37125983 | 37126184 |
| | (SEQ ID NO. 378) | (SEQ ID NO. 379) | | |
| DG13S2607 | TTTGCCAAATCAACCTTCAG | CCTGCTTCACACCTCTGACC | 37317455 | 37317831 |
| | (SEQ ID NO. 380) | (SEQ ID NO. 381) | | |
| DG13S1898 | ACTCACACACAACCACCACA | GCTACTGGTGGGTCGTAAGC | 37318932 | 37319055 |
| | (SEQ ID NO. 382) | (SEQ ID NO. 383) | | |
| D13S1288 | TTCAGAGACCATCACGGC | CTGGAAAAATCAGTTGAATCCTA | 37321295 | 37321486 |
| | (SEQ ID NO. 384) | GC (SEQ ID NO. 385) | | |
| DG13S2567 | AGGAAAGCCGAGAAAGCATA | CATGTATCCACATGCCCAGA | 37416093 | 37416462 |
| | (SEQ ID NO. 386) | (SEQ ID NO. 387) | | |
| DG13S418 | CCTTCAGCGCAGCTACATCT | AGAACTGCGAGGTCCAAGTG | 37473016 | 37473380 |
| | (SEQ ID NO. 388) | (SEQ ID NO. 389) | | |
| DG13S419 | GGGAGAAAGAGAGGTAGGAAGG | TTCCCAAGTTAGCAGCATCC | 37532947 | 37533123 |
| | (SEQ ID NO. 390) | (SEQ ID NO. 391) | | |
| DG13S1051 | TTCTAGAGGAGTCTATTTCTTTAC | GGAGCTGTCACTTGAGCTTTG | 37694432 | 37694579 |
| | TGG (SEQ ID NO. 392) | (SEQ ID NO. 393) | | |
| DG13S1841 | CCGTGACCTACAGGGAACAT | GGCATCGGGTGTTTCTATTC | 37715601 | 37715829 |
| | (SEQ ID NO. 394) | (SEQ ID NO. 395) | | |
| DG13S1052 | AGACCTGCCTGTGTTCTGGT | GGAGTGAAATAAGTGGAACTGGA | 37831275 | 37831438 |
| | (SEQ ID NO. 396) | (SEQ ID NO. 397) | | |
| DG13S1053 | CATTAAATGAGTCATAAAGGTCA | AACATTGTTGCTTTGCTGGA | 37935190 | 37935311 |
| | TGG (SEQ ID NO. 398) | (SEQ ID NO. 399) | | |
| DG13S423 | GGCCTTAGCTCAGTTTCTGG | TGCAAAGACATTTGCGGATA | 37941221 | 37941411 |
| | (SEQ ID NO. 400) | (SEQ ID NO. 401) | | |
| D13S1253 | CCTGCATTTGTGTACGTGT | CAGAGCCGTGGTAGTATATTTTT | 37944396 | 37944533 |
| | (SEQ ID NO. 402) | (SEQ ID NO. 403) | | |
| DG13S2539 | GGAACCAGTCATTGGGTGT | TTATTGCTCCCTCGTCCAAG | 38050898 | 38051253 |
| | (SEQ ID NO. 404) | (SEQ ID NO. 405) | | |
| DG13S2509 | TGCCTTAAGGTCTATTATTTCCTT | ACCAATGCAGGAAGACTCAA | 38067039 | 38067186 |
| | TC (SEQ ID NO. 406) | (SEQ ID NO. 407) | | |
| DG13S1863 | CTGATGAAAGGACACACATGC | TGCATTAACTATGCAGCTTGAAA | 38092085 | 38092353 |
| | (SEQ ID NO. 408) | (SEQ ID NO. 409) | | |
| DG13S2510 | GTCGTGCAATCCCGAGAG | GGATTCCTGCTGGCTCTTCT | 38197807 | 38198059 |
| | (SEQ ID NO. 410) | (SEQ ID NO. 411) | | |
| DG13S1909 | CTGGTGTGGTCAGGAAATGA | GTGCTAAACACATGTGAGTGAGA | 38309328 | 38309442 |
| | (SEQ ID NO. 412) | G (SEQ ID NO. 413) | | |
| DG13S428 | TTTGACCATGCTTTCTCTTTGA | GCTTGATGACTCCCTGCTGT | 38346716 | 38347069 |
| | (SEQ ID NO. 414) | (SEQ ID NO. 415) | | |
| DG13S1858 | AAGCCATTGAAAGGCAGGTA | GGGACTTTCCGGCTTCTATT | 38371574 | 38371742 |
| | (SEQ ID NO. 416) | (SEQ ID NO. 417) | | |
| DG13S1911 | TGGTTGGGAACCATTCTCCT | GCAGAGAAGGGATTTACTCCAG | 38475656 | 38475877 |
| | (SEQ ID NO. 418) | (SEQ ID NO. 419) | | |
| DG13S433 | ACTTGACATGGAGCAAGCTG | AGCTCATCATGCTGTAAGGAG | 38516056 | 38516191 |
| | (SEQ ID NO. 420) | (SEQ ID NO. 421) | | |
| DG13S2421 | CACAGGCTCTCACATTCTCG | TGACACTCATCCCTCTGCTG | 38534972 | 38535357 |
| | (SEQ ID NO. 422) | (SEQ ID NO. 423) | | |
| DG13S2375 | TGAGTTTCATAAGTTTACTACCTG | GGCAGGGAGAAAGGACAAAT | 38548257 | 38548440 |
| | CTG (SEQ ID NO. 424) | (SEQ ID NO. 425) | | |
| D13S1248 | TCCCTTATGTGGGATTAGTTGA | CAGACATGGAACTGAGATTTTTT | 38558005 | 38558267 |
| | (SEQ ID NO. 426) | (SEQ ID NO. 427) | | |
| DG13S1856 | TGTTTCCATCTCTCTACCCATGT | TCAATGTTCTTATTGAGTGGGAAA | 38577323 | 38577506 |
| | (SEQ ID NO. 428) | (SEQ ID NO. 429) | | |
| DG13S435 | ATATCCACCCACCCACACAT | TAGCTCTGAGGGCAGAGACC | 38591043 | 38591261 |
| | (SEQ ID NO. 430) | (SEQ ID NO. 431) | | |
| DG13S2459 | CCGTCCTTCCTCCACTGAT | AGAGCACTGAGGGAGCAAAT | 38596056 | 38596299 |
| | (SEQ ID NO. 432) | (SEQ ID NO. 433) | | |
| DG13S438 | AGCTACAGCACGAGGCAGTT | TTTGAATTGAGTTGCTGTTCG | 38676957 | 38677248 |
| | (SEQ ID NO. 434) | (SEQ ID NO. 435) | | |
| DG13S1865 | TGTACACCACCAACCATTCTG | GGGAAGAAAGGCAAATAGCA | 38684800 | 38684904 |
| | (SEQ ID NO. 436) | (SEQ ID NO. 437) | | |
| DG13S2354 | GGATTGGCAATTAGCAGGTC | GCCTGGTCAAAGATAACAGACG | 38773862 | 38774026 |
| | (SEQ ID NO. 438) | (SEQ ID NO. 439) | | |
| DG13S2534 | CCTGATTAAGCTGGCCTTTG | ATCCTTCTGGGACCCTCATC | 38801698 | 38801951 |
| | (SEQ ID NO. 440) | (SEQ ID NO. 441) | | |
| DG13S1903 | GCTTTGCTTCCTTCTTGGTG | CAACATTACGGCCAGTCTCA | 38802843 | 38803052 |
| | (SEQ ID NO. 442) | (SEQ ID NO. 443) | | |
| DG13S1896 | GGTGCATCTGATAAGCCAAA | GCTGTCTTGGACACAGTGGA | 38815291 | 38815405 |
| | (SEQ ID NO. 444) | (SEQ ID NO. 445) | | |
| DG13S443 | CACCATCATCATCTGGTTGG | GAGCTCATTGAAAGGCAGGA | 38838839 | 38839093 |
| | (SEQ ID NO. 446) | (SEQ ID NO. 447) | | |
| DG13S445 | CCATCCATCTATCCATTTATCTCT | GGATTTATCCTTGCCCTGCT | 38840399 | 38840584 |
| | (SEQ ID NO. 448) | (SEQ ID NO. 449) | | |
| DG13S447 | CTATCATCCATCCATCCTATTTG | TTAGGGCAGCTACCTGGAAA | 38840751 | 38840928 |
| | (SEQ ID NO. 450) | (SEQ ID NO. 451) | | |
| D13S1233 | AGGACTANAGATGAATGCTC | GACATGACTCCATGTTTGGT | 38875108 | 38875292 |
| | (SEQ ID NO. 452) | (SEQ ID NO. 453) | | |
| DG13S2320 | CCTCACCTTGCAATTTCCTG | CTGACTTGCCTGTTGGCATA | 38957405 | 38957570 |
| | (SEQ ID NO. 454) | (SEQ ID NO. 455) | | |
| DG13S451 | TTTGGGATCTTGAAGACCTTT | TTGTGGCATGTCCTTGGTT | 39032835 | 39033191 |
| | (SEQ ID NO. 456) | (SEQ ID NO. 457) | | |
| DG13S180 | TGTACACTGCAAACATTGCTAAA | TTGTCCTTTCATTATGACGTGTCT | 39233968 | 39234350 |
| | (SEQ ID NO. 458) | (SEQ ID NO. 459) | | |
| DG13S458 | AAGCCTGAAAGGATACACACAA | CAGGATCCCAGACTTTCCAG | 39475899 | 39476187 |
| | A (SEQ ID NO. 460) | (SEQ ID NO. 461) | | |
| DG13S2547 | GGTGAATCCCACCCTCATAC | TTGGTATGTTTCCTATTGTTGCAT | 39612492 | 39612849 |
| | (SEQ ID NO. 462) | (SEQ ID NO. 463) | | |
| D13S244 | GAACCAGTGAGTTTTATTAC | AGACACAGCATATAATACATG | 39665226 | 39665353 |
| | (SEQ ID NO. 464) | (SEQ ID NO. 465) | | |
| DG13S2435 | TGAAGCTTTGTGGCTTGTTG | GACTGAGTCCACAGCCCATT | 39863067 | 39863301 |
| | (SEQ ID NO. 466) | (SEQ ID NO. 467) | | |
| D13S263 | CCTGGCCTGTTAGTTTTTATTGTT | CCCAGTCTTGGGTATGTTTTTA | 39878976 | 39879126 |
| | A (SEQ ID NO. 468) | (SEQ ID NO. 469) | | |
| DG13S188 | CCACCATGCAAGAACAGATG | GCTTTGCACTTGGCTGTCTT | 39935769 | 39936103 |
| | (SEQ ID NO. 470) | (SEQ ID NO. 471) | | |
| DG13S189 | TTTGCATGAAGTAAAGTATCCCTG | CACAAACCACAAGATGATTGG | 39968676 | 39969030 |
| | T (SEQ ID NO. 472) | (SEQ ID NO. 473) | | |
| DG13S190 | GGGCATCATGTCTACAACTCA | ACCAAGGGCACTTGCTGATA | 40027542 | 40027801 |
| | (SEQ ID NO. 474) | (SEQ ID NO. 475) | | |
| DG13S2370 | AGGATGAAGAGGGAGGAAGG | CCAGACTGATCTTCCTTAATTAGT | 40159684 | 40159812 |
| | (SEQ ID NO. 476) | TG (SEQ ID NO. 477) | | |
| DG13S196 | CCTCCTCTTTCTGCTGCTGT | AGCCAAAGAACCCAAAGAAAC | 40251445 | 40251793 |
| | (SEQ ID NO. 478) | (SEQ ID NO. 479) | | |
| DG13S2457 | GCCCTACTTTGCCTCAGAAA | GCAACTCATGCCAGCCTCTA | 40376042 | 40376447 |
| | (SEQ ID NO. 480) | (SEQ ID NO. 481) | | |
| DG13S2445 | AACTGTGTTAATGATGGGCAAA | AACGAGCGCATGAAACCTAT | 40422793 | 40423200 |
| | (SEQ ID NO. 482) | (SEQ ID NO. 483) | | |
| DG13S211 | CCTGGTCAATTGAACCCAAA | TGAAGGAAGATAAAGCAGGGTAA | 40434073 | 40434172 |
| | (SEQ ID NO. 484) | (SEQ ID NO. 485) | | |
| DG13S472 | CTCTCTCTGGCCCTCTCTTG | GGTAACTGCCATTCTTCTACCA | 40476985 | 40477395 |
| | (SEQ ID NO. 486) (SEQ ID NO. 487) | | | |
| DG13S207 | ACTCCACCTGAAGGGAGAAA | TGGAAGCCACTAATTGGAGAA | 40545942 | 40546202 |
| | (SEQ ID NO. 488) | (SEQ ID NO. 489) | | |
| DG13S200 | AATGGATGGATACCTCCTTATCA | CTCATTGTGGCTTTCTGTGC | 40737337 | 40737570 |
| | (SEQ ID NO. 490) | (SEQ ID NO. 491) | | |
| DG13S198 | GTACCCACACCTCACCAAGC | CGTAGCTCACATTCCCAACA | 40811813 | 40812059 |
| | (SEQ ID NO. 492) | (SEQ ID NO. 493) | | |
| DG13S215 | GGCGAGTGAAAGAGAGGACA | GGGTGGTAATTCCCAGATGA | 40871695 | 40871992 |
| | (SEQ ID NO. 494) | (SEQ ID NO. 495) | | |
| DG13S221 | TCTGCAACAGCCAGAATCAA | TGTCTGTTTGGCAACTTTCTGTC | 41107773 | 41108TT |
| | (SEQ ID NO. 496) | (SEQ ID NO. 497) | | |
| DG13S219 | AGGTGAACCCAGTCCAGCTA | TCTTAGGCAAAGGAGCCAGT | 41127591 | 41127734 |
| | (SEQ ID NO. 498) | (SEQ ID NO. 499) | | |
| D13S1270 | ACATGAGCACTGGTGACTG | GGCCTCAAATGTTTTAAGCA | 41161654 | 41161831 |
| | (SEQ ID NO. 500) | (SEQ ID NO. 501) | | |
| DG13S225 | TTCTGGGTGTTCGCTATTCC | TTTCCTGTCCAGTCCTGACC | 41212951 | 41213310 |
| | (SEQ ID NO. 502) | (SEQ ID NO. 503) | | |
| D13S1276 | GTTTTGCAGGTCTAGGTCACAC | AGGATAGCTTGAGCCCG | 41213917 | 41214090 |
| | (SEQ ID NO. 504) | (SEQ ID NO. 505) | | |

[0400] All references cited herein are incorporated by reference in their entirety. While this invention has been particularly shown and described with references to preferred embodiments thereof, it will be understood by those skilled in the art that various changes in form and details may be made therein without departing from the scope of the invention encompassed by the appended claims.

### EXAMPLE 10

### Randomized, Placebo-Controlled, Crossover Clinical Trial Demonstrates Inhibition of FLAP Reduced Biomarkers of Risk of Myocardial Infarction

[0401] The 5-lipoxygenase pathway, through FLAP, leads to the production of leukotriene B₄, one of the most potent chemokine mediators of arterial inflammation. The experiments described in Example 7 showed that MI patients make more LTB₄ than do controls. Hence, it appears that the at-risk variant upregulates the leukotriene pathway. A clinical trial was carried out to demonstrate that patients with the genetic variation in FLAP that predisposes to MI could benefit from inhibiting FLAP, with the FLAP inhibitor DG-031. In the short term study, changes in levels of biomarkers that are associated with risk of MI were scored as evidence of changes in the risk of MI.

Patient Population

[0402] All patients in the study had a history of MI and were carriers of specific MI-associated haplotypes in the FLAP and/or the LTA4 hydrolase genes (See U.S. patent application Ser. No. 10/944,272 and PCT Application No. PCT/2004/030582, incorporated by reference in its entirety. The recruitment process included individuals who had previously participated in a study of the genetics of MI (Helgadottir et al., Nat. Genet. 2004;36(3):233-9. 2004). Apart from FLAP, the LTA4 hydrolase gene. also shows significant association to MI in Iceland and baseline mRNA expression of the LTA4 hydrolase gene is greater in MI patients than in control subjects; that is subjects with at-risk variants in either the FLAP or LTA4 hydrolase genes are at increased risk of sustaining MI. Thus, carriers of either the FLAP or LTA4 hydrolase at-risk haplotypes were recruited and their haplotypes were confirmed by analysis of DNA from blood sample collected in the study.

[0403] Nine Single Nucleotide Polymorphism (SNP) markers were genotyped to define the at-risk haplotypes. These SP markers are set out in Table 25 below and are described in detail in Example 1. SNPs genotyping within the FLAP and LTA4 hydrolase genes was performed using SNP-based Taqman platform (ABI) as described in Helgadottir et al., 2004 March;36(3):233-9. The haplotypes carried by each individual were estimated using the program NEMO (version 1.01) and 902 in-house population controls, as described in Gretarsdottir et al., Nat Genet 35:131-8, 2003.

TABLE 25
Genotypes used to derive FLAP and LTA₄ hydrolase at-risk
haplotypes.

| | Haplotype | Allele | SNP | Allele | SNP | Allele | SNP |
|---|---|---|---|---|---|---|---|
| 1 | A3 (FLAP gene) | G | SG13S25 | T | SG13S114 | A | SG13S32 |
| 2 | AF (FLAP gene) | G | SG13S25 | T | SG13S114 | | |
| 3 | NA3 (FLAP gene) | A | SG13S122 | C | SG13S32 | C | SG13S8 |
| 4 | HF (LTA₄-OH gene) | A | SG12S25 | C | SG12S223 | | |
| 5 | GF (LTA₄-OH gene) | A | SG12S225 | T | SG12S233 | | |

[0404] The recruits were asked for permission for the use of their medical and genetic information already collected at deCODE genetics (Reykjavik, Iceland) for the clinical trial. Of over 900 patients identified as eligible by clinical and genotypic criteria, 640 returned their signed consent providing permission to use their genetic and medical data. The genotypes for the FLAP and LTA4 hydrolase genes were subsequently reconfirmed, and those who were carriers of variants in the FLAP and/or LTA4 hydrolase genes were judged eligible for the study if they also met the other inclusion criteria and none of the exclusion criteria set out in Table 26. The baseline characteristics of the patients participating in the study are set out in Table 27. All patients who participated gave informed consent and the protocol was approved by the National Bioethics Committee in Iceland.

TABLE 26
Study eligibility criteria.
Inclusion criteria

Age 40 to 75.
Carrier of the FLAP and/or the LTA₄ hydrolase haplotype
Documented CAD with previous history of MI
Women of childbearing potential must have a negative urine pregnancy
test at visit 1 and are required to use 2 adequate barrier methods
of contraception throughout the study.
Understanding of the study procedures and agreement to participate in
the study by giving written informed consent.

Exclusion criteria

Confirmed diagnosis of congestive heart failure (CHF).
Any experimental treatment within 2 months of screening or planned
for the following 3 months.
Acute CV event (such as ACS, MI or stroke) within 1 month prior to
enrolment.
Elevated CPK above 3 fold upper normal limit (UNL). Other liver
function tests and kidney function tests above 1.5 fold upper
normal limit.
Immunocompromised subjects, including subjects known to be HIV
positive or with malignant disease and/or on chronic
immunosuppressive therapy.
Subjects known to have positive serology results for HBsAg, HCV Ab.
Treatment with immunosuppressive cytotoxic drugs or corticosteroids
within 6 weeks or during conduct of study.
Major surgery within 6 weeks prior to enrolment.
Any other major intercurrent illness and other condition, which, in the
investigator's judgement, will interfere with the subject's
participation in this study.
Subjects not willing to return for follow-up or with known history of non-
compliance.
Patients who consume more than 2 alcoholic drinks/day or ≧10
drinks/week, or history of alcohol abuse within the past 2 years.
Patients must agree to comply with the restrictions on alcohol
(≦2 drinks/day and <10 drinks/week and no alcohol intake within
48 hours of study visits).
Pregnant or lactating women.
Poor mental function or any other reason to expect patient difficulty in
complying with the requirements of the study.

[0405] TABLE 27
Baseline characteristics of the study cohort.

| | 250 mg/day | | 500 mg/day | | 750 mg/day | |
|---|---|---|---|---|---|---|
| | Active- | Placebo- | Active- | Placebo- | Active- | Placebo- |
| | placebo | active | placebo | active | placebo | active |
| Characteristic | (n = 32) | (n = 32) | (n = 32) | (n = 32) | (n = 32) | (n = 31) |
| Demography | | | | | | |
| Male/Female | 24/8 | 24/8 | 24/8 | 24/8 | 24/8 | 24/7 |
| Age (SD), years | 66 (8) | 66 (8) | 65 (7) | 67 (7) | 64 (8) | 67 (7) |
| Age range, years | 47-75 | 47-75 | 51-75 | 52-75 | 47-75 | 56-75 |
| Age > 60 years, % | 78% | 75% | 78% | 78% | 69% | 74% |
| Weight (SD), kg | 86 (11) | 87 (12) | 86 (14) | 92 (18) | 91 (13) | 93 (19) |
| Height (SD), cm | 173 (8) | 174 (7) | 173 (8) | 174 (9) | 174 (7) | 173 (10) |
| BMI (SD), kg/m² | 29 (3) | 29 (3) | 29 (4) | 30 (6) | 30 (4) | 31 (5) |
| Cardiovascular history | | | | | | |
| Two or more prev. infarcts | 3 (9%) | 6 (19%) | 3 (9%) | 7 (22%) | 6 (19%) | 8 (26%) |
| Time since last MI (mo's) | 146 (63) | 137 (73) | 143 (65) | 121 (68) | 129 (71) | 131 (59) |
| Hypertension (current) | 5 (16%) | 10 (31%) | 4 (12%) | 4 (12%) | 8 (25%) | 7 (23%) |
| Diabetes | 10 (31%) | 8 (25%) | 6 (19%) | 12 (38%) | 8 (25%) | 10 (32%) |
| Haplotype frequency | | | | | | |
| A3 carrier (FLAP) | 8 (25%) | 7 (22%) | 8 (25%) | 5 (16%) | 11 (34%) | 13 (42%) |
| AF carrier (FLAP)* | 29 (91%) | 27 (84%) | 28 (88%) | 28 (88%) | 28 (88%) | 26 (84%) |
| NA3 carrier (FLAP) | 5 (16%) | 5 (16%) | 4 (12%) | 3 (9%) | 3 (9%) | 0 (0%) |
| HF carrier (LTA₄-OH) | 13 (41%) | 18 (56%) | 19 (59%) | 22 (69%) | 13 (41%) | 20 (65%) |
| GF carrier (LTA₄-OH) | 3 (9%) | 9 (28%) | 5 (16%) | 6 (19%) | 7 (22%) | 3 (10%) |
| NA3/A3 & HF/GF carrier | 11 (34%) | 12 (38%) | 9 (28%) | 15 (47%) | 9 (28%) | 14 (45%) |
| Relevant medication | | | | | | |
| Statins (%) | 27 (84%) | 28 (88%) | 26 (81%) | 28 (88%) | 25 (78%) | 27 (87%) |
| Other chol'l low'ng drug (%) | 0 (0%) | 0 (0%) | 3 (9%) | 1 (3%) | 1 (3%) | 1 (3%) |
| Aspirin (%) | 28 (88%) | 28 (88%) | 28 (88%) | 25 (78%) | 27 (84%) | 26 (84%) |
| Nitrates (%) | 13 (41%) | 12 (38%) | 10 (31%) | 8 (25%) | 8 (25%) | 12 (39%) |
| Ca-channel blockers (%) | 9 (28%) | 6 (19%) | 9 (28%) | 7 (22%) | 7 (22%) | 8 (26%) |
| ACE-inhibitors (%) | 7 (22%) | 10 (31%) | 12 (38%) | 10 (31%) | 10 (31%) | 13 (42%) |
| Beta-blockers (%) | 22 (69%) | 23 (72%) | 23 (72%) | 18 (56%) | 24 (75%) | 22 (71%) |
| Diuretics (%) | 9 (28%) | 13 (41%) | 7 (22%) | 7 (22%) | 11 (34%) | 9 (29%) |
| Plasma lipids | | | | | | |
| Cholesterol (SD), mmol/L | 5.0 (1.0) | 5.0 (0.8) | 5.2 (1.0) | 4.8 (1.1) | 5.2 (1.2) | 5.0 (1.0) |
| HDL (SD), mmol/L | 1.4 (0.3) | 1.4 (0.3) | 1.5 (0.3) | 1.4 (0.5) | 1.4 (0.4) | 1.4 (0.3) |
| LDL (SD), mmol/L | 3.0 (1.0) | 3.0 (0.7) | 3.1 (1.0) | 2.9 (1.0) | 3.2 (1.0) | 3.0 (0.9) |
| Triglycerides (SD), mmol/L | 1.4 (0.8) | 1.5 (0.7) | 1.7 (1.6) | 1.3 (0.7) | 1.4 (0.7) | 1.4 (0.6) |
| Blood pressure | | | | | | |
| Diastolic (SD), mmHg | 79 (8) | 78 (7) | 81 (11) | 79 (9) | 78 (12) | 78 (7) |
| Systolic (SD), mmHg | 137 (13) | 133 (19) | 139 (22) | 136 (17) | 141 (22) | 140 (17) |
| Smoking habits | | | | | | |
| Never smoked | 9 (28%) | 4 (13%) | 5 (16%) | 3 (9%) | 8 (25%) | 7 (23%) |
| Prior history of smoking | 18 (56%) | 20 (63%) | 19 (59%) | 24 (75%) | 19 (59%) | 16 (52%) |
| Current smoker | 5 (16%) | 8 (25%) | 8 (25%) | 5 (16%) | 5 (16%) | 8 (26%) |
| Alcohol use | | | | | | |
| Never used alcohol | 4 (13%) | 4 (13%) | 2 (6%) | 5 (16%) | 5 (16%) | 5 (16%) |
| Prior use of alcohol | 1 (3%) | 5 (16%) | 4 (13%) | 3 (9%) | 4 (13%) | 2 (6%) |
| Current use of alcohol | 27 (84%) | 23 (72%) | 26 (81%) | 24 (75%) | 23 (72%) | 24 (77%) |

*a common low-risk haplotype (RR 1.3) carried by 85-90% of study subjects

### Study Conduct

[0406] All study participants lived in the Reykjavik metropolitan area or its neighboring townships. All study participants were followed by the designated cardiologists at the University Hospital of Iceland, at their outpatient or private clinics, and all subjects had participated in a study on the genetics of MI. After the subject had given informed consent, a medical and medication history was completed, including co-morbidities, concomitant medications and specific details about the subject's cardiovascular history, including current status. All study participants were fasting and had not taken their medications prior to the study visit. Cardiologists examined the patients at all 8 visits and completed the case report forms. All blood was collected and processed immediately after sampling. All blood specimens used for the biomarker studies were processed within 2 hours of blood sampling.

### Study Drug

[0407] Patients (191 subjects) who met the study eligebility criteria were enrolled and randomized into 3 different dose-level groups: (1) 64 patients on 250 mg/day therapy with DG-031 (250 mg q.d.), vs placebo; (2) 64 patients on 500 mg/day therapy with DG-031 (250 mg b.i.d.) vs placebo; and (3) 63 patients on 750 mg/day therapy with DG-031 (250 mg t.i.d.) vs placebo. The 750 mg/day dose was well tolerated in previous phase I-III human studies (Dahlen et al., Thorax 1997; 52:342-7; Hamilton et al., Thorax 1997; 52:348-54), conducted on healthy volunteers and patients with asthma as a part of the drug development program for Bayer x 1005 (now DG-031). All patients received 3 tablets per day. Treatment periods, 4 weeks in duration each, were separated by a 2-week washout period. The placebo tablets were identical in shape, color, form and taste to the active tablets except that they contained no active drug ingredients. Treatment with DG-031 or placebo was in addition to the subject's standard care, including all medications and treatment plan as prescribed by the subject's cardiologist prior to enrollment. The cross-over study design is summarized in FIG. 9. Due to early termination of 19 subjects (primarily related to unavailability due to travel), 11 were replaced prior to enrollment closure. Thus, a total of 191 subjects were enrolled, with 172 completing all 8 visits or 8 patients (4.4%) short of target. Three subjects did not return for early termination visit.

### Data Analysis, Randomization and Statistical Considerations

[0408] All data were analyzed according to a pre-established analysis plan and by intention-to-treat. Hypotheses were tested at a two-sided nominal significance level of 0.05. Each arm of the study, as well as pooled sets (combining dose levels), was considered for the primary analysis. Each such set is a standard AB/BA cross-over design and in the primary analysis of efficacy, the levels of biomarkers of MI risk at the end of the treatment periods (visits 4 and 7) were used as primary response variables. The difference between DG-031 and placebo treatment was the primary outcome, assessed separately for each of the biomarkers. Treatment effect was tested using a two-sample t-test on the period differences for suitably transformed response variables, under an assumption of normality of the transformed data. We report treatment effect as one half of the observed mean differences in the two-sample t-test, with a 95% CI. No pre-tests for carry-over effect were performed as a part of the primary analysis. Tests for carry-over were done and are reported separately from results of primary analysis. As was prespecified for the primary analysis, a simple Bonferroni-adjustment based on 10 biomarkers for the primary objective for the pooled set of the two highest doses, was used to report the outcome of the primary objective. All p-values reported are nominal.

[0409] To cancel out potential seasonal effects, carry-over effects were also studied with two-sample t-tests that compare maesurements of the AB (drug/placebo) group with the measurenents of the BA (placebo/drug) group. To estimate the effect of the drug at visit 3 for the AB group, (v3-v2), with v3 and v2 denoting, respectively, measurements at visit 3 and visit 2, was used. Similarly (v4-v2) and (v5-v2) were used to estimate effects at visits 4 and 5. For estimating the effect at visit 6, [(v6-v2)+(v3-v2)] was used. Note that v6 from the BA group includes the drug effect after two weeks which cancels the drug effect at visit 3 from the AB group. Similarly, [(v7-v2)+(v4-v2)] was used to estimate the effect at visit 7. The two higher dose AB groups were used for all visits. All 3 BA groups are used for visits 3, 4 and 5 since they had all received the same treatment until visit 5, but only the two higher dose BA groups are used for visits 6 and 7.

[0410] The sample size for this study was chosen so that each of the three arms provided, after up to 5% dropout, at least 80% power (with α=0.05, two-sided) to detect a relative lowering of 15% for a log-normal response variable, given that an assay for that variable has a coefficient of variation of 20% and the intra-person coefficient of variation is as high as 25%. Based on these assumptions, the recruitment target included 180 subjects with randomization into 3 different dose-level groups as described above.

[0411] At the enrollment visit, an independent study nurse who was blinded to the drug content, dispensed medication kits according to a computer generated randomization list. Randomization of study patients was stratified according to sex. For both strata, a permuted block design with block size 12 was used to assign patients into each of the six sequences of the study. All biomarkers were transformed using a shifted log transform (transformed value is natural log of original value plus a shifting constant for each assay). Missing data were filled in using a simple last observation carried forward (LOCF) scheme, in cases where no previous measurement existed, next observation was carried back. Statistical outliers for data sets were brought in based on IQR distance from median.

### Biomarker Measurements

[0412] The ELISA and mass spectrometry assays were used to measure the levels of the MI at risk biomarkers and are summarized in Table 28. Apart from measurements in plasma, LTB₄ and MPO were also measured in whole blood preparations ex vivo following ionomycin-activation of leukocytes, using ELISA and mass spectrometry. Both dose- and time-dependent stimulations were performed to determine the maximum LTB₄ and MPO output of the cells. Correction was made for white blood cell count, as the amount of these mediators produced relates to the number of cells in a fixed volume. On the log scale the adjustment was based on a linear model, with coefficients determined empirically at time of blind review. Several tertiary markers were also measured including: IL-6, IL-12p40, TNFα, MMP-9, sICAM, sVCAM, P-selectin, E-selectin, MCP-1 and oxidised LDL.

TABLE 28
Methods and assays used to quantify study biomarkers.

| | | | | |
|---|---|---|---|---|
| Assay | Supplier | Name of kit | Catalog nr. | Principle of the method |

ELISA method

| | | | | |
|---|---|---|---|---|
| Myeloperoxidase (MPO) | Assay Design, | Titerzyme EIA | # 900-115 | A quantitative solid phase |
| | Inc. | | | sandwich ELISA |
| LTB₄ | R&D | LTB₄ | # DE0275 | A competitive binding |
| | | | | immunoassay |
| Amyloid A | Biosource | Human SAA kit | # KHA0012 | A quantitative solid phase |
| | | | | sandwich ELISA |
| Cysteinyl Leukotriene | R&D | Cysteinyl | # DE3200 | A competitive binding |
| | | Leukotriene | | immunoassay |
| Nitrotyrosine | OxisResearch | Bioxytech Nitro | # 21055 | A quantitative solid phase |
| | | tyrosine-EIA | | sandwich ELISA |
| TNF-α | R&D | Quantikine HS | # HSTA00C | A quantitative solid phase |
| | | Human TNF-α | | sandwich ELISA |
| IL6 | R&D | Quantikine HS | # HS600B | A quantitative solid phase |
| | | Human IL-6 | | sandwich ELISA |
| IL-12p40 | R&D | Quantikine Human | # DP400 | A quantitative solid phase |
| | | IL-12p40 | | sandwich ELISA |
| MCP-1 | R&D | Quantikine Human | # DCP00 | A quantitative solid phase |
| | | MCP-1 | | sandwich ELISA |
| ICAM | R&D | Parameter human | # BBE 1B | A quantitative solid phase |
| | | sICAM-1 | | sandwich ELISA |
| sE-Selectin | R&D | Parameter human | # BBE 2B | A quantitative solid phase |
| | | sEselectin | | sandwich ELISA |
| sP-Selectin | R&D | Parameter human | # BBE 6 | A quantitative solid phase |
| | | sPselectin | | sandwich ELISA |
| VCAM | R&D | Parameter human | # BBE 3 | A quantitative solid phase |
| | | sVCAM-1 | | sandwich ELISA |
| MMP 9 | R&D | Quantikine Human | # DMP900 | A quantitative solid phase |
| | | MMP-9(total) | | sandwich ELISA |
| Oxidised LDL | Mercodia | Oxidised LDL Elisa | # 10-1143-01 | A quantitative solid phase |
| | | | | sandwich ELISA |
| Lp-PLA₂ | Diadexus San | PLAC test | | A quantitative solid phase |
| | Fransisco, CA | | | sandwich ELISA |

Other methods

| | | | | |
|---|---|---|---|---|
| Hs-CRP | Roche Hitachi | Hs-CRP | 11972855 | Immunoturbidimetric assay |
| | 912 analyser | | | |
| LTB₄ (MS) | LC/MS/MS | LTB₄ assay | | Mass spectrometer with |
| | | | | internal standard |

### Clinical Outcome

[0413] Baseline values for the biomarker variables prior to treatment are shown in Table 29. For the primary efficacy endpoint, as specified in the statistical analysis plan, 10 variables were considered in the pooled set of subjects on 500 mg and 750 mg arms and the data is set out in Table 30. The primary efficacy endpoint of the study was confirmed by showing that DG-031 reduces levels of LTB₄ produced by ionomycin-activated neutrophils ex vivo for the pooled set of 500 mg and 750 mg arms (nominal p=0.0042), and this is statistically significant after correction for multiple testing. As shown in Table 30, the maximum reduction in LTB₄ and MPO production amounted to 26% for LTB₄ (nominal p=0.0026) and 13% for MPO (nominal p=0.023) at the 750 mg/day dose of DG-031. DG-031 also reduced significantly serum sICAM-1 (nominal p=0.02), but no effects were observed on other tertiary markers. Lp-PLA₂ increased by 9% (nominal p=0.0056) in response to the highest dose of DG-031 and there was comparable increase observed in LDL cholesterol (8%) that correlated with Lp-PLA₂. In contrast, the effects of the 2 lower doses (250 mg/day and 500 mg/day) on Lp-PLA₂ were not significant. Urine levels of LTE₄ increased by 27% in response to the highest dosage of DG-031 (nominal p=0.00002)). Significant correlation was observed between the inhibition of LTB₄ and MPO production in response to DG-031 (r=0.65, p<0.00001).

TABLE 29
Summary statistics of baseline biomarker values.

| | 250 mg/day | | 500 mg/day | | 750 mg/day | |
|---|---|---|---|---|---|---|
| | Active- | Placebo- | Active- | Placebo- | Active- | Placebo- |
| | placebo | active | placebo | active | placebo | active |
| Assay | (n = 32) | (n = 32) | (n = 32) | (n = 32) | (n = 32) | (n = 31) |

Primary objectives

| | | | | | | |
|---|---|---|---|---|---|---|
| Amyloid A | 9.92 (0.94) | 9.84 (0.75) | 9.78 (0.91) | 9.44 (0.43) | 9.74 (0.43) | 9.63 (0.50) |
| | n = 32 | n = 32 | n = 32 | n = 32 | n = 32 | n = 31 |
| Hs-CRP | 0.78 (0.88) | 0.95 (1.12) | 0.75 (1.19) | 0.46 (0.73) | 0.89 (0.81) | 0.77 (0.86) |
| | n = 32 | n = 32 | n = 32 | n = 32 | n = 32 | n = 31 |
| Lp-PLA₂ | 5.47 (0.33) | 5.50 (0.29) | 5.49 (0.27) | 5.32 (0.39) | 5.51 (0.41) | 5.42 (0.22) |
| | n = 32 | n = 32 | n = 32 | n = 32 | n = 32 | n = 31 |
| LTB₄ in whole | 10.78 (0.85) | 11.02 (0.85) | 10.41 (0.65) | 10.54 (0.75) | 10.74 (0.57) | 10.85 (0.87) |
| blood^{†} | n = 32 | n = 32 | n = 32 | n = 31 | n = 32 | n = 30 |
| LTB₄ in w.b.*, | 8.14 (0.71) | 8.24 (0.76) | 7.79 (0.68) | 7.95 (0.69) | 8.11 (0.59) | 8.11 (0.72) |
| corr for wbc^{†,‡} | n = 32 | n = 32 | n = 32 | n = 31 | n = 32 | n = 30 |
| LTE₄ in urine | 6.57 (0.33) | 6.69 (0.32) | 6.53 (0.40) | 6.55 (0.38) | 6.67 (0.48) | 6.69 (0.40) |
| | n = 31 | n = 31 | n = 32 | n = 32 | n = 32 | n = 31 |
| MPO in plasma | 3.72 (0.51) | 3.71 (0.55) | 3.47 (0.41) | 3.51 (0.37) | 3.71 (0.45) | 3.72 (0.52) |
| | n = 32 | n = 32 | n = 32 | n = 32 | n = 31 | n = 31 |
| MPO in whole | 6.54 (0.49) | 6.67 (0.37) | 6.47 (0.44) | 6.38 (0.49) | 6.56 (0.34) | 6.64 (0.47) |
| blood | n = 31 | n = 32 | n = 32 | n = 31 | n = 32 | n = 31 |
| MPO in w. b.*, | 4.69 (0.39) | 4.74 (0.37) | 4.65 (0.37) | 4.58 (0.44) | 4.73 (0.33) | 4.75 (0.34) |
| corr. for wbc^{‡} | n = 31 | n = 32 | n = 32 | n = 31 | n = 32 | n = 31 |
| N-tyrosine | 3.18 (0.73) | 3.40 (1.02) | 3.25 (0.95) | 3.81 (1.48) | 3.50 (0.99) | 3.66 (1.42) |
| | n = 31 | n = 31 | n = 28 | n = 29 | n = 31 | n = 30 |

Tertiary objectives

| | | | | | | |
|---|---|---|---|---|---|---|
| ICAM | 5.67 (0.27) | 5.67 (0.21) | 5.65 (0.29) | 5.66 (0.20) | 5.69 (0.25) | 5.68 (0.23) |
| | n = 32 | n = 32 | n = 32 | n = 32 | n = 32 | n = 31 |
| IL12p40 | 4.98 (0.41) | 4.87 (0.48) | 4.86 (0.36) | 5.04 (0.42) | 5.02 (0.50) | 4.96 (0.43) |
| | n = 32 | n = 32 | n = 32 | n = 32 | n = 32 | n = 31 |
| IL6 | 0.87 (0.40) | 1.15 (0.63) | 1.07 (0.89) | 0.90 (0.32) | 0.95 (0.71) | 1.11 (0.42) |
| | n = 32 | n = 32 | n = 32 | n = 32 | n = 32 | n = 31 |
| MCP-1 | 5.92 (0.39) | 5.90 (0.23) | 5.86 (0.21) | 5.94 (0.24) | 5.92 (0.23) | 5.91 (0.23) |
| | n = 32 | n = 32 | n = 32 | n = 31 | n = 32 | n = 31 |
| MMP 9 | 6.34 (0.39) | 6.40 (0.44) | 6.10 (0.47) | 6.20 (0.42) | 6.15 (0.43) | 6.15 (0.52) |
| | n = 32 | n = 32 | n = 32 | n = 32 | n = 32 | n = 31 |
| Oxidized - LDL | 11.09 (0.33) | 11.06 (0.37) | 11.03 (0.29) | 11.12 (0.30) | 11.07 (0.33) | 11.08 (0.30) |
| | n = 32 | n = 32 | n = 32 | n = 32 | n = 32 | n = 31 |
| sE-Selectin | 4.20 (0.19) | 4.21 (0.28) | 4.12 (0.25) | 4.19 (0.33) | 4.22 (0.26) | 4.24 (0.36) |
| | n = 32 | n = 32 | n = 32 | n = 32 | n = 32 | n = 31 |
| sP-Selectin | 4.85 (0.30) | 5.00 (0.47) | 4.72 (0.28) | 4.72 (0.30) | 4.90 (0.48) | 4.77 (0.35) |
| | n = 32 | n = 31 | n = 31 | n = 31 | n = 32 | n = 30 |
| sVCAM | 6.09 (0.18) | 6.06 (0.15) | 6.08 (0.17) | 6.07 (0.19) | 6.09 (0.24) | 6.10 (0.17) |
| | n = 32 | n = 32 | n = 32 | n = 32 | n = 30 | n = 31 |
| TNF-α | 0.64 (0.48) | 0.56 (0.54) | 0.51 (0.49) | 0.54 (0.39) | 0.53 (0.46) | 0.47 (0.43) |
| | n = 26 | n = 27 | n = 27 | n = 30 | n = 29 | n = 27 |

*w.b. = whole blood
^{†}baseline is not available for LTB₄ measured using mass spectrometry
^{‡}corr. for wbc = corrected for white blood cell count

[0414] Table 30. Treatment effect based on two sample t-test for the treatment groups, the pooled sets for the two highest doses and all doses (natural log scale).

TABLE 30
Treatment effect based on two sample t-test for the treatment groups, the pooled sets for the two
highest doses and all doses (natural log scale).

| | | | | | |
|---|---|---|---|---|---|
| | 250 mg/day | 500 mg/day | 750 mg/day | 500 & 750 mg/day | 250, 500 & 750 |
| Assay | (n = 64) | (n = 64) | (n = 63) | (n = 127) | mg/day (n = 191) |

Primary objectives

| | | | | | |
|---|---|---|---|---|---|
| Amyloid A | 0.03 [−0.09, 0.15] | −0.05 [−0.17, 0.06] | −0.01 [−0.11, 0.09] | −0.03 [−0.11, 0.05] | −0.01 [−0.07, 0.05] |
| | (p = 0.61) | (p = 0.36) | (p = 0.90) | (p = 0.43) | (p = 0.77) |
| Hs-CRP | 0.05 [−0.14, 0.24] | 0.09 [−0.09, 0.26] | 0.04 [−0.13, 0.21] | 0.06 [−0.06, 0.18] | 0.06 [−0.04, 0.16] |
| | (p = 0.59) | (p = 0.34) | (p = 0.66) | (p = 0.32) | (p = 0.26) |
| Lp-PLA₂ | 0.05 [−0.03, 0.12] | 0.03 [−0.04, 0.10] | 0.09 [0.03, 0.15] | 0.06 [0.01, 0.10] | 0.05 [0.01, 0.09] |
| | (p = 0.24) | (p = 0.37) | (p = 0.0056) | (p = 0.012) | (p = 0.0073) |
| LTB₄ in w.b.*, mass | −0.11 [−0.29, 0.06] | −0.09 [−0.28, 0.11] | −0.26 [−0.46, −0.06] | −0.17 [−0.31, −0.04] | −0.15 [−0.26, −0.05] |
| spec.^{†} | (p = 0.19) | (p = 0.38) | (p = 0.010) | (p = 0.013) | (p = 0.0051) |
| LTB₄ in w.b.*, corr. | −0.11 [−0.28, 0.05] | −0.08 [−0.26, 0.09] | −0.30 [−0.49, −0.11] | −0.19 [−0.32, −0.06] | −0.16 [−0.27, −0.06] |
| for wbc^{‡}, m.s.^{§} | (p = 0.18) | (p = 0.35) | (p = 0.0026) | (p = 0.0042) | (p = 0.0018) |
| LTB₄ in whole blood^{†} | −0.13 [−0.35, 0.09] | −0.19 [−0.44, 0.06] | −0.30 [−0.56, −0.04] | −0.24 [−0.42, −0.07] | −0.21 [−0.34, −0.07] |
| | (p = 0.24) | (p = 0.13) | (p = 0.025) | (p = 0.0073) | (p = 0.0036) |
| LTB₄ in w.b.*, corr. | −0.13 [−0.35, 0.08] | −0.18 [−0.42, 0.05] | −0.34 [−0.59, −0.09] | −0.26 [−0.43, −0.09] | −0.22 [−0.35, −0.08] |
| for wbc^{†,‡} | (p = 0.22) | (p = 0.12) | (p = 0.0089) | (p = 0.0027) | (p = 0.0014) |
| LTE₄ in urine | 0.14 [0.03, 0.24] | 0.15 [0.05, 0.24] | 0.24 [0.14, 0.34] | 0.19 [0.12, 0.26] | 0.17 [0.12, 0.23] |
| | (p = 0.011) | (p = 0.0030) | (p = 0.00002) | (p < 0.00001) | (p < 0.00001) |
| MPO in plasma | −0.07 [−0.22, 0.07] | 0.08 [−0.04, 0.21] | −0.04 [−0.17, 0.09] | 0.02 [−0.07, 0.11] | −0.01 [−0.09, 0.06] |
| | (p = 0.32) | (p = 0.20) | (p = 0.49) | (p = 0.68) | (p = 0.76) |
| MPO in whole blood^{†} | 0.01 [−0.08, 0.11] | −0.01 [−0.13, 0.11] | −0.11 [−0.22, 0.00] | −0.06 [−0.14, 0.02] | −0.04 [−0.10, 0.03] |
| | (p = 0.78) | (p = 0.85) | (p = 0.056) | (p = 0.14) | (p = 0.27) |
| MPO in w. b.*, corr. | 0.01 [−0.08, 0.11] | 0.00 [−0.11, 0.12] | −0.13 [−0.24, −0.02] | −0.06 [−0.14, 0.02] | −0.04 [−0.10, 0.02] |
| for wbc^{‡} | (p = 0.76) | (p = 0.94) | (p = 0.023) | (p = 0.12) | (p = 0.24) |
| N-tyrosine | −0.03 [−0.15, 0.09] | −0.03 [−0.13, 0.08] | 0.03 [−0.08, 0.14] | 0.00 [−0.07, 0.08] | −0.01 [−0.07, 0.05] |
| | (p = 0.60) | (p = 0.60) | (p = 0.56) | (p = 0.96) | (p = 0.78) |

Tertiary objectives

| | | | | | |
|---|---|---|---|---|---|
| ICAM | 0.00 [−0.04, 0.03] | 0.00 [−0.04, 0.03] | −0.03 [−0.06, 0.00] | −0.02 [−0.04, 0.00] | −0.01 [−0.03, 0.01] |
| | (p = 0.83) | (p = 0.81) | (p = 0.025) | (p = 0.10) | (p = 0.16) |
| IL12p40 | 0.01 [−0.04, 0.06] | 0.02 [−0.04, 0.08] | 0.01 [−0.04, 0.06] | 0.01 [−0.02, 0.05] | 0.01 [−0.02, 0.04] |
| | (p = 0.69) | (p = 0.53) | (p = 0.70) | (p = 0.46) | (p = 0.40) |
| IL6 | −0.02 [−0.13, 0.09] | 0.06 [−0.03, 0.16] | −0.01 [−0.10, 0.09] | 0.03 [−0.04, 0.09] | 0.01 [−0.05, 0.07] |
| | (p = 0.68) | (p = 0.19) | (p = 0.87) | (p = 0.40) | (p = 0.69) |
| MCP-1 | −0.02 [−0.07, 0.03] | 0.02 [−0.03, 0.08] | −0.03 [−0.08, 0.03] | 0.00 [−0.04, 0.04] | −0.01 [−0.04, 0.02] |
| | (p = 0.51) | (p = 0.35) | (p = 0.32) | (p = 0.98) | (p = 0.69) |
| MMP 9 | −0.03 [−0.12, 0.05] | 0.02 [−0.06, 0.11] | −0.02 [−0.11, 0.06] | 0.00 [−0.06, 0.06] | −0.01 [−0.06, 0.04] |
| | (p = 0.47) | (p = 0.58) | (p = 0.60) | (p = 0.97) | (p = 0.69) |
| Oxidized - LDL | 0.00 [−0.08, 0.07] | 0.02 [−0.07, 0.11] | 0.06 [−0.03, 0.16] | 0.04 [−0.02, 0.11] | 0.03 [−0.02, 0.08] |
| | (p = 0.91) | (p = 0.65) | (p = 0.16) | (p = 0.18) | (p = 0.28) |
| sE-Selectin | 0.03 [−0.03, 0.09] | −0.01 [−0.06, 0.04] | −0.04 [−0.09, 0.01] | −0.02 [−0.06, 0.01] | 0.00 [−0.04, 0.03] |
| | (p = 0.30) | (p = 0.82) | (p = 0.11) | (p = 0.20) | (p = 0.75) |
| sP-Selectin | −0.02 [−0.11, 0.06] | 0.00 [−0.08, 0.08] | 0.09 [0.01, 0.16] | 0.04 [−0.02, 0.10] | 0.02 [−0.03, 0.07] |
| | (p = 0.58) | (p = 0.97) | (p = 0.034) | (p = 0.15) | (p = 0.40) |
| sVCAM | 0.00 [−0.05, 0.04] | −0.01 [−0.06, 0.04] | −0.03 [−0.07, 0.02] | −0.02 [−0.05, 0.01] | −0.01 [−0.04, 0.01] |
| | (p = 0.85) | (p = 0.60) | (p = 0.24) | (p = 0.24) | (p = 0.28) |
| TNF-α | 0.00 [−0.08, 0.09] | −0.02 [−0.10, 0.07] | 0.01 [−0.07, 0.08] | 0.00 [−0.06, 0.06] | 0.00 [−0.05, 0.05] |
| | (p = 0.93) | (p = 0.70) | (p = 0.85) | (p = 0.90) | (p = 0.95) |

*w.b. = whole blood
^{†}measurement is not part of the primary analysis wrt adjustment for multiple testing
^{‡}corr. for wbc = corrected for white blood cell count
^{§}m.s. = mass spec. = mass spectrometry

### Tests for Carry-over Effects

[0415] A test for carry-over effects from the treatment phase to the placebo phase was performed as a two-sample t-test on the differences between visit 2 and 5 for patients on drug and placebo, respectively. The cohort taking drug consists of patients on 500 mg/day and 750 mg/day treatment and the placebo cohort includes patients on placebo from all 3 tracks. The resulting p-values and confidence intervals for the effect are given in Table 31 (data were not available for Lp-PLA₂ and N-tyrosine). No carry over effects were observed with LTB₄ and MPO. In contrast, marked carry over effects were observed for CRP and SAA, with reduction in CRP that was significant at the 5% level (p=0.017). SAA showed similar carry over effects that was slightly below this significance level (p==0.051).

TABLE 31
Test for carry-over effect for each study period.

| Assay | p-value | Effect | 95% Cl |
|---|---|---|---|
| CRP | 0.017 | −0.28 | [−0.52, −0.05] |
| Amyloid A | 0.051 | −0.14 | [−0.29, 0.00] |
| LTE₄ in urine | 0.48 | −0.06 | [−0.22, 0.10] |
| MCP-1 | 0.084 | 0.07 | [−0.01, 0.15] |
| MMP 9 | 0.56 | −0.04 | [−0.16, 0.09] |
| MPO in plasma | 0.28 | −0.11 | [−0.31, 0.09] |
| White blood cell count | 0.57 | −0.01 | [−0.06, 0.03] |
| LTB₄ in whole blood, corr. | 0.45 | −0.10 | [−0.36, 0.16] |
| for wbc^{‡} | | | |
| MPO in whole blood, corr. | 0.93 | 0.01 | [−0.13, 0.15] |
| for wbc^{‡} | | | |
| LTB₄ in whole blood, | 0.45 | 0.19 | [−0.33, 0.71] |
| mass spec.^{§} | | | |
| LTB₄ in whole blood, corr. | 0.64 | 0.12 | [−0.40, 0.64] |
| for wbc, m.s.^{§} | | | |

^{‡}corr. for wbc = corrected for white blood cell count
^{§}m.s. = mass spec. = mass spectrometry

[0416] FIG. 10 shows the estimated mean effects on CRP and SAA for the subjects receiving the two higher drug doses in the first period. Note that measurements from subjects receiving the placebo first also contribute to these estimates to cancel out potential seasonal effects. For visits 3 (after 2 weeks on therapy) and 4 (after 4 weeks on therapy), this constitutes the treatment effect, whereas the carry-over effects appear between visits 5 to 7.

[0417] The level of CRP dropped at visits 3 and 4, but not significantly. The reduction became more pronounced, about 25%, and significant at visit 5 (p=0.017), and seems to persists until visit 7, during the time the subjects were on placebo. This prolonged effect is part of the reason that the drug effect was not detected in the primary analysis which did not take this scenario into account. The design of this trial does not have maximal power for studying such effects which is reflected by the large standard errors in the estimates, particularly for visits 6 and 7. Even though measurements at visits 3 and 6 are not available for SAA, the observed changes of CRP and Amyloid A between visits 2 and 5 are highly correlated (r=0.68, p<0.00001). Hence it appears that the drug has similar effects on both biomarkers.

[0418] No difference was detected in the effects of DG-031 on biomarkers of MI risk between patients with FLAP or LTA4 hydrolase haplotypes when the data were analysed separately.

[0419] There was no difference in serious adverse events between the treatment groups or dose armns in the study cohort. In particular, no difference was detected in liver transaminases between the groups on active drug or placebo. The only symptom that was significantly more often reported for active drug was dizziness, experienced by 6 patients on active drug (any dose) and none on placebo (p=0.032). This did not interfere with the daily activities of the subjects.

[0420] When taken together, the data generated through the MI gene-isolation (Example 1) and the clinical trial reported herein, show that DG031 is a safe and well tolerated drug that can, at least in part, correct a biochemical defect that confers a relative risk of acute cardiovascular events that is similar to or greater than the risk conferred by the top quintile of LDL cholesterol. Indeed, the data suggest that DG-031 reduces serum levels of CRP and SAA by approximately 25%, suggesting that this will cause reduction in the risk of acute cardiovascular events.

### EXAMPLE 11

### Clinical Trial Investigating the Effect of Compositions Comprising a Leukotriene Synthesis Inhibitor and a Statin on Biomarkers of Risk of Myocardial Infarction

[0421] A randomized, placebo-controlled crossover-clinical trial, as described in Example 10, is carried out to investigate the effect of compositions comprising a leukotriene synthesis inhibitor and a statin on the levels of biomarkers of risk of MI. The participants for the study optionally are carriers of variants in the FLAP and/or LTA4 hydrolase genes set out in Table 25. One group of participants receives a leukotriene synthesis inhibitor alone, such as DG031. Another group of participants receives a statin alone. A third group of participants receives a composition comprising both a leukotriene synthesis inhibitor and a statin. The forth group of participants receives a placebo.

[0422] Each participant receives the treatment for at least two months and the levels of biomarkers set out in Table 28 are monitored in each participant for at least three months. It is expected that the group receiving a leukotriene synthesis inhibitor alone will have a 25% decrease in CRP levels and the group receiving a statin alone will also have a 25% decrease in CRP levels. More substantial decrease in CRP from combination therapy is evidence that the combination therapy is beneficial. In view of the data from the clinical trial described in Example 10, wherein almost all (about 85%) of the participants were on statin therapy, it is expected that the group receiving the combination therapy will exhibit a 50% decrease in CRP levels.

### EXAMPLE 12

### Association of variants in the gene encoding ALOX5AP/FLAP to MI in a North American Population

[0423] As described in Example 1, a variant in the gene encoding 5-Lipoxygenase activating protein (ALOX5AP/FLAP) confers risk to both MI and stroke in Iceland. Another SNP-based haplotype within ALOXSAP, HapB, showed significant association to MI in British cohorts as described in Example 9. using similar techniques, the association between HapA and HapB and MI in a North American (“Cleveland”) cohort was analyzed.

[0424] The ALOX5AP haplotype HapA is also associated to MI in a North-American population. The SNPs defining HapA (SG13S25, SG13S114, SG13S89, and SG13S32) and HapB (SG13S377, SG13S114, SG13S41 and SG13S35) were genotyped in 696 MI patients (553 males and 143 females) and 698 controls (314 males and 384 females). The majority of the study subjects were Caucasians and approximately 10% were African American. Information on the ethnicity at an individual level was not available.

[0425] The SNP haplotype analysis was done using the program NEMO (Gretarsdottir et al., Nat Genet 35:131-8, 2003). NEMO handles missing genotypes and uncertainty with phase through a likelihood procedure, using the expectation-maximization algorithm as a computational tool to estimate haplotype frequencies. For the at-risk haplotypes we calculated the relative risk (RR) assuming a multiplicative model (Falk& Rubinstein P Ann Hum Genet 51 (Pt 3):227-33, 1987: Terwilliger & Ott Hum Hered. 42:337-46, 1992) in which the risk of the two alleles of haplotypes a person carries multiply.

[0426] The results of the haplotype association analysis for HapA and HapB are shown in Table 32. As demonstrated in the Icelandic population (see Example 1), the estimated frequency of HapA was significantly greater in the patient group than in the control group. In the total cohort, the allelic/haplotype frequency of HapA was 16.9% and 13.6% in patients and controls respectively (P=0.014), which corresponds to a 29% increase in risk of MI for each copy of HapA carried. The relative risk of MI in the total group was 1.29 and a P-value for the association was 0.014. In addition, HapA was overrepresented in patients who had experienced an MI relatively early in life (males before the age of 55 and females before the age of 65). As shown in Table 32, the relative risk of early onset MI (males before the age of 55 and females before the age of 65) was 1.61 and the P-value for the association was 0.0034.

TABLE 32
Association of HapA and HapB with MI

| | HapA | | | HapB | | |
|---|---|---|---|---|---|---|
| Phenotype (n) | Frequency | RR | P | Frequency | RR | P |
| Total cohort | | | | | | |
| Controls (698) | 0.136 | | | 0.074 | | |
| MI (696) | 0.169 | 1.29 | 0.014 | 0.081 | 1.1 | NS |
| Early onset | 0.205 | 1.61 | 0.0034 | | | |
| (170) | | | | | | |

[0427] The association of HapB to MI in the study cohort was also studied. HapB has previously been shown to confer risk of MI in an English cohort (see Example 9). A slight excess of HapB was observed in the total patient group (8.1%) compared to all controls (7.4%), but it was not significant (Table 32).

[0428] This analysis demonstrated that an ALOX5AP haplotype, HapA, previously reported to confer risk of MI and stroke in an Icelandic cohort (Example 1), and to stroke in a Scottish cohort (described below in Example 14), associates with MI in an North-American population. HapB that confers risk of MI in an British cohort (Example 9) was not associated with MI in this North-American cohort.

### EXAMPLE 13

### Additional ALOX5AP/FLAP Haplotype Associated with MI in a North American Population

[0429] From the analysis of the Cleveland cohort described in Example 12, another haplotype was identified which significantly associated with MI. This haplotype is denoted as HapC, and 5 variations of this haplotype were identified (HapC1, HapC2, HapC3, HapC4-A, HapC4-B). These haplotypes show the most significant association to MI in the Cleveland cohort.

[0430] These haplotypes are defined in Table 33. HapC1 is the T allele of marker SG13S375. HapC2 has T allele of marker SG13S375 and the G allele of SG13S25. HapC3 adds allele A of SG13S32 plus T allele of marker SG13S375 and the G allele of SG13S25. The addition of the fourth SNP or SG13S106 splits HapC3 into two parts, or HapC4-A and HapC4-B. Allele G of SNP SG13S25, which is in HapC2, HapC3, HapC4-A and HapC4-B is also a characteristic of HapA.

[0431] The frequency of HapC1, HapC2, HapC3 and HapC4-A and B in different populations are shown in the Table 33. HapC1, HapC2, and HapC3 are over-represented in the patient groups in all populations tested. In the Iceland and UK cohors studied, the HapC4-A part of HapC3 seems to be the one that captures all of the risk conferred by HapC3.

[0432] All HapC variants except HapC4-B are correlated with HapA, meaning the chromosomes that carry HapC also tend to carry HapA. The correlation between HapC4-A and HapA is defined by a correlation coefficient (R2) of 0.52; the linkage disequilibrium (D′) of 0.77 and the P-value (measure of significance) of 6.4×10-312. HapC is also correlated with HapB, although HapA and HapB are negatively correlated. The correlation between HapC4-A and HapB haplotypes is defined by a correlation coefficient (R2) of 0.08; the linkage disequilibrium (D′) of 0.05 and the P-value of 2.2×10-39.

TABLE 33

| | | | | | | | | | | | |
|---|---|---|---|---|---|---|---|---|---|---|---|
| | | | # of | Aff. | # of | Control | | | | | |
| Haplotype | p-value | RR | Affected | Frequency | Controls | Frequency | Info | SG13S375 | SG13S25 | SG13S106 | SG13S32 |

Total Cleveland Cohort

| | | | | | | | | | | | |
|---|---|---|---|---|---|---|---|---|---|---|---|
| HapC1 | 0.002089 | 1.385 | 666 | 0.86036 | 662 | 0.816465 | 1 | T | | | |
| HapC2 | 0.000416 | 1.3722 | 683 | 0.774968 | 671 | 0.715071 | 1 | T | G | | |
| HapC3 | 0.000148 | 1.4012 | 695 | 0.346955 | 695 | 0.274923 | 0.9 | T | G | | A |
| HapC4-A | 0.038937 | 1.2662 | 696 | 0.184999 | 698 | 0.152022 | 0.8 | T | G | G | A |
| HapC4-B | 0.003222 | 1.4174 | 696 | 0.166372 | 698 | 0.123424 | 0.8 | T | G | A | A |

United Kingdom Cohort

| | | | | | | | | | | | |
|---|---|---|---|---|---|---|---|---|---|---|---|
| HapC1 | 3.00E−01 | 1.15 | 559 | 0.894 | 591 | 0.881 | 1 | T | | | |
| HapC2 | 6.40E−02 | 1.2 | 741 | 0.808 | 708 | 0.778 | 0.9 | T | G | | |
| HapC3 | 3.90E−02 | 1.2 | 747 | 0.341 | 719 | 0.302 | 0.8 | T | G | | A |
| HapC4-A | 1.10E−02 | 1.31 | 749 | 0.21 | 721 | 0.169 | 0.8 | T | G | G | A |
| HapC4-B | 8.90E−01 | 1.02 | 749 | 0.134 | 721 | 0.132 | 0.7 | T | G | A | A |

Iceland MI Cohort

| | | | | | | | | | | | |
|---|---|---|---|---|---|---|---|---|---|---|---|
| HapC1 | 2.90E−01 | 1.14 | 645 | 0.886 | 575 | 0.872 | 1 | T | | | |
| HapC2 | 1.10E−01 | 1.16 | 774 | 0.756 | 612 | 0.728 | 0.9 | T | G | | |
| HapC3 | 4.50E−02 | 1.19 | 775 | 0.33 | 618 | 0.292 | 0.9 | T | G | | A |
| HapC4-A | 8.00E−04 | 1.5 | 777 | 0.169 | 622 | 0.119 | 0.8 | T | G | G | A |
| HapC4-B | 5.40E−01 | 0.93 | 777 | 0.162 | 622 | 0.172 | 0.9 | T | G | A | A |

Iceland Stroke Cohort

| | | | | | | | | | | | |
|---|---|---|---|---|---|---|---|---|---|---|---|
| HapC1 | 4.80E−01 | 1.09 | 683 | 0.881 | 575 | 0.872 | 1 | T | | | |
| HapC2 | 2.90E−01 | 1.1 | 697 | 0.749 | 612 | 0.73 | 0.9 | T | G | | |
| HapC3 | 1.90E−02 | 1.23 | 700 | 0.343 | 618 | 0.297 | 0.9 | T | G | | A |
| HapC4-A | 1.90E−04 | 1.58 | 702 | 0.181 | 622 | 0.122 | 0.8 | T | G | G | A |
| HapC4-B | 4.70E−01 | 0.92 | 702 | 0.16 | 622 | 0.171 | 0.9 | T | G | A | A |

### EXAMPLE 14

### Association of Variants in the Gene Encoding ALOX5AP/FLAP to Stroke in a Scottish Population

[0433] Analysis of HapA and HapB haplotypes was carried out in a Scottish cohort as described in Example 1 and 9. The SNPs defining HapA (SG13S25, SG13S114, SG13S89, and SG13S32) and HapB (SG13S377, SG13S114, SG13S41 and SG13S35) were genotyped in 450 Scottish stroke patients and 710 controls. The patient and control cohorts have been described previously (MacLeod et al., Neurology 53:418-20, 1999; Meiklejohn et al., Stroke 32:57-62, 2001; Duthie et al., Am J Clin. Nutr. 75:908-13, 2002; Whalley et al., Am J Clin. Nutr., 2004). In brief, 450 patients from North East Scotland with CT confirmation of ischemic stroke. (including 26 patients with transient ischemic attack (TIA)) were recruited between 1997 and 1999, within one week of admission to the Acute stroke unit at Aberdeen Royal Infirmary. Patients were further subclassified according to the TOAST research criteria (Adams et al., Stroke 24:35-41, 1993). One hundred and fifty five patients (34%) had large vessel stroke, 96 (21.3%) had cardiogenic stroke and 109 (24.2%) had small vessel stroke. In 5 cases (1.1%) stroke with other determined etiology was diagnosed, 7 (1.5%) had more than one etiology, and 78 (17.3%) had unknown cause of stroke despite extensive evaluation. Seven hundred and ten controls with no history of stroke or TIA were recruited as a part of the 1921 (n=227) and 1936 (n=371) Aberdeen Birth Cohort Studies (Duthie et al., Am. J. Clin. Nutr. 75:908-13, 2002; Whalley et al., Am J Clin. Nutr., 2004), and from primary care (n=l 12) (Meiklejohn et al., Stroke 32:57-62, 2001).

[0434] The SNP haplotype analysis was done using the program NEMO (Gretarsdottir et al., Nat Genet 35:131-8, 2003). NEMO handles missing genotypes and uncertainty with phase through a likelihood procedure, using the expectation-maximization algorithm as a computational tool to estimate haplotype frequencies. As the two haplotypes tested had previously been shown to confer risk of MI and stroke in an Icelandic cohort, and MI in an English cohort, the reported P-values are one-sided. For the at-risk haplotypes we calculated the relative risk (RR) assuming a multiplicative model (Falk & Rubinstein P Ann Hum Genet 51 (Pt 3):227-33, 1987: Terwilliger & Ott Hum Hered. 42:337-46, 1992) in which the risk of the two alleles of haplotypes a person carries multiply.

[0435] The results of the haplotype association analysis for HapA and HapB are shown in Table 34. The haplotype frequencies of HapA in the Scottish stroke and control populations were higher than in the corresponding Icelandic populations. As demonstrated in the Icelandic population, the estimated frequency of HapA was significantly greater in Scottish stroke patients than in Scottish controls. The carrier frequency of HapA in Scottish patients and controls were 33.4% and 26.4%, respectively, resulting in a relative risk of 1.36 (P=0.007) and a corresponding PAR 9.6%. In the Icelandic population, a higher frequency of HapA was observed in male patients when compared to female patients with either stroke or MI. This gender difference in the frequency of HapA was not observed in the Scottish population.

TABLE 34
Association of HapA and HapB with ischemic stroke

| | HapA | | | | | |
|---|---|---|---|---|---|---|
| | Fre- | | | HapB | | |
| Phenotype (n) | quency | RR | P-value | Frequency | RR | P-value |
| Scotland | | | | | | |
| Controls (710) | 0.142 | | | 0.058 | | |
| Ischemic stroke | 0.184 | 1.36 | 0.007 | 0.068 | 1.20 | NS |
| (450)^{a} | | | | | | |
| Males (253) | 0.183 | 1.35 | 0.023 | 0.092 | 1.65 | 0.016 |
| Females (181) | 0.179 | 1.34 | 0.044 | 0.035 | 0.58 | NS |
| Iceland | | | | | | |
| Controls (624) | 0.095 | | | 0.07 | | |
| Ischemic stroke | 0.147 | 1.63 | 0.00013 | 0.073 | 1.09 | NS |
| (632) | | | | | | |
| Males (335) | 0.155 | 1.75 | 0.0002 | 0.086 | 1.31 | NS |
| Females (297) | 0.138 | 1.51 | 0.0079 | 0.058 | 0.86 | NS |

[0436] The association of HapB to stroke in the Scottish cohort was also investigated. HapB has previously been shown to confer risk of MI in an English cohort (Example 9). A slight excess of HapB was observed in the patient group (6.8%) compared to controls (5.8%), but it was not significant (Table 34). However, gender specific analysis showed that the frequency of HapB was higher in males with ischemic stroke (9.2%) than in controls, resulting in a RR of 1.65 (P=0.016). The frequency of HapB in females with ischemic stroke was 3.5% which was lower but not significantly different from controls. The frequencies of HapB in males and females with ischemic stroke differed significantly (P=0.0021). As shown in Table 34, similar trends were observed in our Icelandic cohort; the frequency of HapB being greater in males with ischemic stroke (8.6%) than in females with ischemic stroke (5.8%), although this was not significant (P=0.055).

[0437] Thus, HapA, the risk haplotype of ALOX5AP, associates with ischemic stroke in a Scottish cohort. HapB was not associated with ischemic stroke in the Scottish cohort. However, HapB was overrepresented in male patients.

### EXAMPLE 15

### Identification of LTA4H Haplotypes Associated with MI Study Population

[0438] Patients entering the study were defined from a myocardial infarction (MI) registry that includes all MIs (over 8,000 patients) in Iceland from 1981 to 2002. This registry is a part of the World Health Organization MONICA Project (The World Health Organization MONICA Project (monitoring trends and determinants in cardiovascular disease): a major international collaboration. WHO MONICA Project Principal Investigators. J. Clin. Epidemiol. 1988; 41:105-14). Diagnosis of all patients in the registry follow strict diagnostic rules based on symptoms, electrocardiograms, cardiac enzymes, and necropsy findings.

[0439] Blood samples from over 1500 MI patients, both cases with a family history and sporadic cases were collected. For each patient that participated, blood was collected from 2 relatives (unaffected or affected). Their genotypes were used to help with construction of haplotypes. Blood samples from over 950 controls were also collected. The control cohort was population based.

### Linkage Analysis

[0440] In an effort to enrich for those patients who had stronger genetic factors contributing to their risk for MI, we fractionated the MI cohort to those patients with earlier onset MI. We chose different age cutoffs for male and females since the average age of MI in females is 10 years older than for males. Using MI onset at age less than 50 in males and less than 60 in females, 196 patients were clustered within 67 Pedigrees. These pedigrees included related earlier onset MI patients such that each patient is related to at least one other patient up to and including six meiotic events. The information regarding the relatedness of patients was obtained from an encrypted genealogy database that covers the entire Icelandic nation (Gulcher et al, Eur. J. Hum. Genet. 8: 739-742 (2000)). A genome-wide scan was performed using a framework map of 1000 microsatellite markers, using protocols described elsewhere (Gretarsdottir S., et al. Am. J Hum. Genet.,70: 593-603, 2002)). The marker order and positions were obtained from deCODE genetic's high resolution genetic map (Kong A, et al., Nat. genet., 31: 241-247 (2002)). All markers used in the linkage analysis are publicly available microsatellite markers. The population-based allele frequencies were constructed from a cohort of more than 30,000 Icelanders who have participated in genetic studies of various disease projects.

[0441] For statistical analysis, multipoint, affected only allele-sharing methods were used to assess evidence for linkage. All results, both the LOD and the non-parametric linkage (NPL) score, were obtained using the program ALLEGRO (Gudbjartsson D. F., et al., Nat Genet., 25: 12-13(2000)). The baseline linkage analysis (Gretarsdottir S., et al., Am. J. Hum. Genet. 70: 593-603, (2002)) uses the Spairs scoring function (Whittermore A S, and Haplem J A., Biometrics 50: 118-127 (1994)) and Kruglyak et al., Am. J. Hum. Genet., 58:1347-1363 (1996)) the exponential allele-sharing model (Kong A., and Cox N. J., Am. J. Hum. Genet. 61:1179-1188 (1997)), and a family weighting scheme which is halfway, on the log-scale, between weighing each affected pairs equally and weighing each family equally.

### Fine Mapping

[0442] A candidate susceptibility locus was defined as the region under the LOD score curve where the score was one lower than the highest lod score ((peak lod score−1)one lod drop). This region (approx. 12 Mb) was finemapped with microsatellite markers with an average spacing between markers of approximately 1.5 cM.

### Case-control Haplotype Association Analysis

[0443] A large case-control analysis was initially carried out using over 560 male MI patients and 338 female MI patients and 480 population-based controls in an effort to find the MI gene within the linkage peak on chromosome 12 found in genome-wide linkage analysis. Given that a member of the leukotriene biosynthetic pathway, LTA4H, was near the peak microsatellite marker, an effort was made to identify microsatellite markers positioned close to, or within, the LTA4H gene. Three microsatellite markers were identified within the deCODE genetics modified assembly of the public UCSC human genome sequence assembly and they were subsequently genotyped. In addition, SNPs were identified within the LTA4H gene by sequencing 93 patients. Out of the 90 SNPs that were identified 12 were selected to genotype 894 patients and 462 controls. These three microsatellite markers and 12 SNPs, were subsequently used for haplotype analysis. Results from the initial haplotype analysis are shown in Table 38 and Table 39.

[0444] We then typed a subset of the markers on more MI patients and controls. This subset included 8 SNPs and 3 microsatellite markers. In addition, we typed 9 new SNPs on the total cohort which now included 1560 MI patients and 953 controls. Results from the haplotype association analysis, using the extended cohort and a total of 17 SNPs and 3 microsatellite markers, are shown in Table 39.

[0445] The frequencies of haplotypes in the patient and the control groups using an expectation-maximization algorithm were estimated (Dempster A. P. et al., J. R. Stat. Soc. B. 39: 1-389 (1977)). An implementation of this algorithm that can handle missing genotypes and uncertainty with the phase was used. Under the null hypothesis, the patients and the controls are assumed to have identical frequencies. Using a likelihood approach, an alternative hypothesis where a candidate at-risk-haplotype is allowed to have a higher frequency in patients than controls, while the ratios of the frequencies of other haplotypes are assumed to be the same in both groups was tested. Likelihoods are maximized separately under both hypothesis and a corresponding 1-df likelihood ratio statistics is used to evaluate the statistic significance.

[0446] To assess the significance of the haplotype association corrected for multiple testing, we carried out a randomisation test using the same genotype data. We randomised the cohorts of patients and controls and repeated the analysis. This procedure was repeated up to 500 times and the adjusted P value is the fraction of replications that produced a P value for some haplotype tested that is lower than or equal to the P value we observed using the original patient and control cohorts.

### Results

[0447] Table 35 shows the results of the first step of the linkage analysis; multipoint non-parametric LOD scores for a framework marker map on chromosome 12. A LOD score suggestive of linkage of 1.95 was found at marker D12S2081. This linkage peak was one of the highest peaks found for the earlier onset MI phenotype. Table 36 shows the results of the second step of the linkage analysis; multipoint non-parametric LOD scores for the families after adding 20 fine mapping markers to the candidate region. The inclusion of additional microsatellite markers increased the information on sharing by decent from 0.8 to 0.9, around the markers that gave the highest LOD scores. The lodscore in this locus increased to 2.01 and the peak marker was D12S348 at centimorgin distance 110.6. Thus the locus remained suggestive for linkage suggesting that a gene conferring risk for MI was within the 10 million bases defined by the width of the linkage peak.

[0448] One of the genes close to the peak marker at this linkage peak (that is, the marker with the highest sharing or lodscore) was LTA4H. Our previous genetic work with FLAP showed that the leukotriene biosynthetic pathway plays a major role in MI risk. Since LTA4H encodes a major member of the leukotriene biosynthetic pathway converting Leukotriene A to Leukotriene B, we chose to test it for association to MI in a case-control study using 894 MI patients and 462 population-based controls.

[0449] The genomic sequence of the LTA4H gene is set out as SEQ ID NO:. 718. The sequence of the LTA4H mRNA is set out as SEQ ID NO: 719. The sequence of the LTA4H polypeptide is set out as SEQ ID NO: 720.

[0450] Table 37 shows SNPs that were found by sequencing the LTA4H gene. One of the SNPs, LTA4H_{—}31334, is in the coding region. The polymorphism, AG, does not change the amino acid sequence in the protein. The rest of the SNPs were outside the coding exons of LTA4H and were within introns or flanking regions of LTA4H.

[0451] Table 38 shows results from the initial haplotype association analysis using 894 MI patients and 462 controls that were typed with 3 microsatellite markers and 12 SNPs. The following markers show a significant association with MI in males: DG12S1664, SG12S16, SG12S17, SG12S18, SG12S21, SG12S22, SG12S23, SG12S24, SG12S25, SG12S26, DG12S1666, SG12S1O0, SG12S28, and SG12S144, with alleles 0, C, A, T, G, G, T, T, A, T, 0, and T, T, and A, respectively. The allelic frequency of a shorter version of this haplotype including markers DG12S1664, SG12S26, DG12S1666, and SG12S144, with alleles 0, T, 0, and A, respectively, is 51% in male MI patients and 43% in controls (carried by 76% of male patients and 67% of controls). Allelic frequency of this haplotype is higher, or 56%, in a subgroup of patients that have had more than one MI (see Table 38).

[0452] Table 39 shows the results of the haplotype association analysis using 1560 unrelated MI patients and 953 unrelated population controls. A haplotype comprised of the consecutive markers was highly significant in MI patients that had also had either stroke or peripheral arterial occlusive disease (PAOD) (P-value adjusted for multiple comparisons=0.007). The fact that the haplotypes shown in Table 39 are more significant in MI patients that have more than one clinically evident cardiovascular complication might indicate that the gene played a role in clinical activity or severity of the atherosclerotic disease. The significantly associated haplotype is comprised of the following consecutive markers; SG12S438, DG12S1664, SG12S16, SG12S21, SG12S23, SG12S25, SG12S26, DG12S1666, SG12S100, SG12S28, SG12S143,SG12S144, SG12S221, SG12S222, SG12S223, SG12S225, SG12S226, SG12S233, SG12S237, and DG12S1668 with alleles C, 0, C, G, T, A, T, 0, T, T, T, A, G, C, C, G, G, C,T,and 0. Also shown in Table 39 is a shorter version of the consecutive haplotype and a haplotype that shows a significant protection against MI involving more than one clinically evident cardiovascular complication.

[0453] In summary, it has been shown for the first time that genetic variants of LTA4H show significant association to MI. The results complement previous work showing that variants in FLAP are significantly associated with MI. In both cases the risk ratio is similar to or higher than the conventional and well-known risk factors for MI including smoking, hypercholesterolemia, hypertension and diabetes anong others.

[0454] All embodiments of the invention in relation to FLAP genetic discoveries, including but not limited to genetic and protein materials, genetic testing materials and methods, and testing and therapy are also applicable in the context of LTA4H genetic discoveries, and are repeated here by reference. Agents that target any point in the leukotriene biosynthesis pathway are contemplated and expected to be useful in therapy or prophylaxis for subjects with any of the genetic predispositions identified herein. For example, FLAP inhibitors are specifically contemplated for therapy of subjects at risk due to a LTA4H genotype.

TABLE 35
The marker map for chromosome 12 and LOD scores in the first step
of the linkage analysis.

| location | LOD | dhat | NPL | Zlr | Info | marker |
|---|---|---|---|---|---|---|
| 0 | 1.2574 | −0.4865 | −1.6783 | −2.4063 | 0.5456 | D12S352 |
| 3.083 | 1.7993 | −0.5525 | −2.1441 | −2.8786 | 0.6374 | D12S1608 |
| 3.554 | 1.8107 | −0.5494 | −2.1696 | −2.8877 | 0.6472 | D12S1656 |
| 6.566 | 1.8434 | −0.5493 | −2.2066 | −2.9136 | 0.6591 | D12S1626 |
| 7.956 | 1.8748 | −0.5527 | −2.2239 | −2.9383 | 0.6638 | D12S372 |
| 12.93 | 1.5997 | −0.4719 | −2.166 | −2.7142 | 0.7291 | D12S1725 |
| 13.761 | 1.6842 | −0.4859 | −2.2249 | −2.785 | 0.732 | D12S314 |
| 16.166 | 1.6989 | −0.5279 | −2.0948 | −2.7971 | 0.6467 | D12S374 |
| 24.078 | 1.0258 | −0.4043 | −1.5861 | −2.1734 | 0.6036 | D12S336 |
| 26.254 | 1.0166 | −0.3907 | −1.6163 | −2.1637 | 0.6338 | D12S1697 |
| 31.288 | 0.9373 | −0.3846 | −1.5323 | −2.0775 | 0.6 | D12S364 |
| 34.202 | 0.8469 | −0.3806 | −1.4006 | −1.9748 | 0.5518 | D12S1728 |
| 39.399 | 0.8692 | −0.4163 | −1.3441 | −2.0007 | 0.4871 | D12S1682 |
| 44.135 | 0.7789 | −0.3786 | −1.306 | −1.894 | 0.5121 | D12S1591 |
| 49.974 | 0.7977 | −0.3819 | −1.3162 | −1.9166 | 0.5166 | D12S1640 |
| 52.254 | 0.8638 | −0.3759 | −1.4437 | −1.9945 | 0.5749 | D12S1704 |
| 53.951 | 0.8005 | −0.3442 | −1.4441 | −1.92 | 0.6191 | D12S1681 |
| 55.792 | 0.4155 | −0.2301 | −1.0815 | −1.3833 | 0.6554 | D12S345 |
| 57.468 | 0.2695 | −0.1842 | −0.8653 | −1.114 | 0.6382 | D12S1668 |
| 61.09 | 0.6674 | −0.3134 | −1.2999 | −1.7531 | 0.6074 | D12S85 |
| 67.239 | 0.9722 | −0.3854 | −1.5762 | −2.116 | 0.6203 | D12S368 |
| 74.802 | 0.8922 | −0.3971 | −1.4186 | −2.027 | 0.5412 | D12S83 |
| 76.789 | 0.9969 | −0.4272 | −1.4897 | −2.1426 | 0.5351 | D12S329 |
| 84.363 | 0.0618 | −0.103 | −0.3514 | −0.5333 | 0.4367 | D12S313 |
| 92.292 | 0.0266 | 0.052 | 0.2826 | 0.3497 | 0.6444 | D12S326 |
| 96.995 | 0.2219 | 0.1438 | 0.8312 | 1.0108 | 0.6496 | D12S1708 |
| 102.426 | 1.0345 | 0.2707 | 2.0001 | 2.1827 | 0.7615 | D12S351 |
| 103.746 | 1.4296 | 0.3119 | 2.3732 | 2.5659 | 0.7625 | D12S95 |
| 109.914 | 1.9537 | 0.3537 | 2.8183 | 2.9995 | 0.7796 | D12S2081 |
| 112.689 | 1.4231 | 0.2984 | 2.4796 | 2.56 | 0.84 | D12S346 |
| 114.367 | 1.1079 | 0.2685 | 2.1563 | 2.2588 | 0.8307 | D12S1727 |
| 117.962 | 1.2498 | 0.2916 | 2.2133 | 2.3991 | 0.7773 | D12S78 |
| 123.398 | 0.2995 | 0.1592 | 1.012 | 1.1744 | 0.7055 | D12S1613 |
| 126.542 | 0.1457 | 0.1139 | 0.6968 | 0.819 | 0.6986 | D12S1583 |
| 132.981 | 0.0058 | 0.0232 | 0.1392 | 0.1631 | 0.7222 | D12S354 |
| 133.655 | 0.0011 | 0.0106 | 0.0607 | 0.0725 | 0.6962 | D12S369 |
| 133.964 | 0.0012 | 0.0107 | 0.0608 | 0.0728 | 0.6913 | D12S79 |
| 139.646 | 0.0742 | 0.0823 | 0.4953 | 0.5844 | 0.701 | D12S366 |
| 142.505 | 0.1383 | 0.1088 | 0.694 | 0.7979 | 0.7292 | D12S395 |
| 143.459 | 0.0732 | 0.0795 | 0.5072 | 0.5805 | 0.7417 | D12S2073 |
| 143.698 | 0.0886 | 0.0875 | 0.5572 | 0.6387 | 0.7369 | D12S1349 |
| 144.394 | 0.0604 | 0.0727 | 0.4591 | 0.5275 | 0.7376 | D12S378 |
| 148.306 | 0 | 0.0013 | 0.0084 | 0.0096 | 0.7673 | D12S1614 |
| 151.275 | 0.0125 | 0.0351 | 0.1985 | 0.2397 | 0.6764 | D12S324 |
| 155.308 | 0.3155 | 0.1758 | 0.9568 | 1.2054 | 0.6008 | D12S2075 |
| 156.144 | 0.2797 | 0.1706 | 0.8734 | 1.1348 | 0.5679 | D12S1675 |
| 158.207 | 0.3194 | 0.1834 | 0.9265 | 1.2128 | 0.5549 | D12S1679 |
| 162.448 | 0.3706 | 0.1872 | 1.0567 | 1.3063 | 0.6156 | D12S1659 |
| 164.59 | 0.368 | 0.1876 | 1.0474 | 1.3019 | 0.6084 | D12S367 |
| 172.615 | 0.3231 | 0.1872 | 0.9214 | 1.2199 | 0.5371 | D12S1723 |
| 174.333 | 0.2827 | 0.1781 | 0.847 | 1.1411 | 0.5229 | D12S1638 |

[0455] TABLE 36
The marker map for chromosome 12 and LOD scores, in the second
step of the linkage analysis.

| location | LOD | dhat | NPL | Zlr | Info | marker |
|---|---|---|---|---|---|---|
| 0 | 1.6956 | −0.6253 | −1.8379 | −2.7944 | 0.4963 | D12S352 |
| 3.758 | 2.024 | −0.6098 | −2.2287 | −3.053 | 0.6154 | D12S1608 |
| 4.239 | 2.0532 | −0.6089 | −2.262 | −3.0749 | 0.6257 | D12S1656 |
| 4.899 | 2.0351 | −0.6062 | −2.2476 | −3.0614 | 0.6244 | D12S100 |
| 4.949 | 2.0335 | −0.6059 | −2.2466 | −3.0601 | 0.6243 | D12S1694 |
| 5.825 | 1.9982 | −0.5969 | −2.2337 | −3.0335 | 0.6278 | D12S1615 |
| 7.41 | 1.895 | −0.5609 | −2.2259 | −2.9541 | 0.6556 | D12S1626 |
| 8.241 | 1.9046 | −0.5627 | −2.2255 | −2.9616 | 0.6556 | D12S372 |
| 9.071 | 1.8945 | −0.5659 | −2.197 | −2.9537 | 0.6463 | D12S835 |
| 9.239 | 1.8908 | −0.5659 | −2.1919 | −2.9509 | 0.6452 | D12S1050 |
| 9.628 | 1.8804 | −0.5648 | −2.1812 | −2.9427 | 0.6435 | D12S1652 |
| 13.786 | 1.6009 | −0.4751 | −2.1492 | −2.7152 | 0.7218 | D12S1725 |
| 14.624 | 1.596 | −0.4767 | −2.1379 | −2.7111 | 0.7157 | D12S314 |
| 15.679 | 1.7102 | −0.5249 | −2.1113 | −2.8064 | 0.6569 | D12S328 |
| 15.729 | 1.7111 | −0.5255 | −2.1102 | −2.8071 | 0.656 | D12S93 |
| 15.917 | 1.7113 | −0.5272 | −2.1062 | −2.8073 | 0.6527 | D12S99 |
| 16.495 | 1.6721 | −0.5331 | −2.0411 | −2.7749 | 0.6266 | D12S1673 |
| 16.684 | 1.6562 | −0.5339 | −2.0199 | −2.7617 | 0.6192 | D12S356 |
| 17.131 | 1.6124 | −0.5336 | −1.9702 | −2.725 | 0.6035 | D12S374 |
| 20.18 | 1.4787 | −0.5541 | −1.7482 | −2.6095 | 0.5214 | D12S1625 |
| 23.545 | 1.1182 | −0.4645 | −1.5402 | −2.2693 | 0.5229 | D12S397 |
| 24.869 | 0.9441 | −0.4038 | −1.4682 | −2.0852 | 0.5568 | D12S1695 |
| 24.979 | 0.9297 | −0.3985 | −1.4625 | −2.0692 | 0.5606 | D12S336 |
| 25.269 | 0.9337 | −0.399 | −1.4663 | −2.0736 | 0.5617 | D12S1674 |
| 25.559 | 0.9367 | −0.3992 | −1.4704 | −2.077 | 0.5632 | D12S1690 |
| 25.772 | 0.9384 | −0.3989 | −1.4735 | −2.0788 | 0.5648 | D12S1696 |
| 25.793 | 0.9385 | −0.3989 | −1.4738 | −2.0789 | 0.5649 | D12S77 |
| 26.767 | 0.9395 | −0.3946 | −1.4893 | −2.08 | 0.5758 | D12S827 |
| 27.155 | 0.937 | −0.3915 | −1.4961 | −2.0773 | 0.5821 | D12S1697 |
| 27.325 | 0.938 | −0.3939 | −1.4894 | −2.0784 | 0.5766 | D12S89 |
| 28.883 | 0.9248 | −0.4057 | −1.4313 | −2.0636 | 0.5411 | D12S391 |
| 30.851 | 0.8473 | −0.39 | −1.3665 | −1.9754 | 0.5299 | D12S1581 |
| 31.936 | 0.7765 | −0.3651 | −1.3345 | −1.891 | 0.5429 | D12S1580 |
| 32.188 | 0.7575 | −0.3576 | −1.3274 | −1.8677 | 0.5489 | D12S320 |
| 32.238 | 0.7536 | −0.356 | −1.326 | −1.863 | 0.5503 | D12S364 |
| 32.735 | 0.7445 | −0.3581 | −1.3038 | −1.8516 | 0.538 | D12S308 |
| 34.013 | 0.7073 | −0.3557 | −1.2478 | −1.8048 | 0.5172 | D12S2210 |
| 34.335 | 0.6949 | −0.3532 | −1.2338 | −1.7889 | 0.5143 | D12S1303 |
| 35.153 | 0.6582 | −0.3436 | −1.1984 | −1.741 | 0.5108 | D12S1728 |
| 36.074 | 0.693 | −0.3705 | −1.1841 | −1.7864 | 0.4727 | D12S1715 |
| 37.358 | 0.7161 | −0.3917 | −1.1671 | −1.816 | 0.4445 | D12S310 |
| 37.716 | 0.723 | −0.3955 | −1.1681 | −1.8247 | 0.4414 | D12S1669 |
| 39.199 | 0.7267 | −0.3952 | −1.1753 | −1.8294 | 0.4443 | D12S1650 |
| 40.35 | 0.7034 | −0.3777 | −1.1844 | −1.7998 | 0.4644 | D12S1682 |
| 45.086 | 0.6102 | −0.3149 | −1.1956 | −1.6764 | 0.5509 | D12S1591 |
| 46.757 | 0.645 | −0.3251 | −1.2237 | −1.7234 | 0.5509 | D12S1057 |
| 47.216 | 0.6504 | −0.3287 | −1.2219 | −1.7307 | 0.5449 | D12S1617 |
| 49.098 | 0.6565 | −0.332 | −1.2227 | −1.7387 | 0.5404 | D12S1596 |
| 50.007 | 0.6508 | −0.3269 | −1.2292 | −1.7312 | 0.5503 | D12S1034 |
| 50.925 | 0.6382 | −0.3169 | −1.2391 | −1.7144 | 0.5696 | D12S1640 |
| 53.204 | 0.7066 | −0.3153 | −1.3729 | −1.8039 | 0.6362 | D12S1704 |
| 53.205 | 0.7066 | −0.3153 | −1.373 | −1.8039 | 0.6362 | D12S1643 |
| 54.901 | 0.6809 | −0.2936 | −1.4087 | −1.7708 | 0.695 | D12S1681 |
| 55.526 | 0.5731 | −0.2654 | −1.301 | −1.6245 | 0.6994 | D12S1648 |
| 55.827 | 0.5217 | −0.2504 | −1.25 | −1.55 | 0.7065 | D12S61 |
| 56.499 | 0.4119 | −0.2146 | −1.1385 | −1.3772 | 0.737 | ATA73C05 |
| 56.549 | 0.4041 | −0.2119 | −1.1303 | −1.3641 | 0.7401 | D12S1621 |
| 56.793 | 0.3671 | −0.1986 | −1.0906 | −1.3002 | 0.7572 | D12S345 |
| 57.118 | 0.3602 | −0.1959 | −1.0835 | −1.288 | 0.7615 | D12S2080 |
| 58.072 | 0.3416 | −0.1881 | −1.0664 | −1.2542 | 0.7782 | D12S1048 |
| 58.469 | 0.3345 | −0.1849 | −1.0609 | −1.2411 | 0.7867 | D12S1668 |
| 59.057 | 0.3671 | −0.1944 | −1.1109 | −1.3002 | 0.7874 | D12S1589 |
| 59.716 | 0.4056 | −0.2045 | −1.1706 | −1.3667 | 0.7932 | D12S291 |
| 60.054 | 0.4612 | −0.221 | −1.2374 | −1.4573 | 0.7826 | D12S1301 |
| 61.826 | 0.7555 | −0.2833 | −1.6011 | −1.8652 | 0.8213 | D12S1713 |
| 62.09 | 0.7752 | −0.2879 | −1.6189 | −1.8894 | 0.819 | D12S85 |
| 63.701 | 0.8433 | −0.309 | −1.6549 | −1.9707 | 0.7867 | D12S1701 |
| 64.377 | 0.8374 | −0.3088 | −1.6463 | −1.9637 | 0.7819 | D12S2199 |
| 64.888 | 0.821 | −0.3047 | −1.6355 | −1.9445 | 0.785 | D12S1590 |
| 65.096 | 0.8096 | −0.3025 | −1.6239 | −1.9309 | 0.784 | D12S1627 |
| 65.665 | 0.8586 | −0.3194 | −1.6441 | −1.9884 | 0.756 | D12S1620 |
| 65.666 | 0.8587 | −0.3194 | −1.6441 | −1.9885 | 0.7561 | D12S1635 |
| 66.235 | 0.8957 | −0.3295 | −1.6678 | −2.031 | 0.7474 | D12S1633 |
| 66.236 | 0.8958 | −0.3295 | −1.6678 | −2.0311 | 0.7473 | D12S1629 |
| 66.838 | 0.9205 | −0.3325 | −1.6967 | −2.0589 | 0.7558 | D12S347 |
| 67.205 | 0.9208 | −0.3307 | −1.7028 | −2.0592 | 0.7633 | D12S1677 |
| 68.24 | 1.1611 | −0.3656 | −1.9527 | −2.3124 | 0.8101 | D12S368 |
| 68.854 | 1.1354 | −0.3678 | −1.9021 | −2.2867 | 0.7842 | D12S96 |
| 69.118 | 1.1237 | −0.3682 | −1.8815 | −2.2749 | 0.7746 | D12S398 |
| 70.315 | 1.0649 | −0.3662 | −1.7961 | −2.2145 | 0.7407 | D12S1604 |
| 70.523 | 1.0539 | −0.3653 | −1.7827 | −2.2031 | 0.7365 | D12S359 |
| 70.637 | 1.0579 | −0.3678 | −1.7787 | −2.2072 | 0.7304 | D12S1651 |
| 71.597 | 1.0794 | −0.3844 | −1.7459 | −2.2296 | 0.6917 | D12S1724 |
| 71.8 | 1.0813 | −0.3867 | −1.7392 | −2.2315 | 0.6859 | D12S1707 |
| 72.252 | 1.0822 | −0.3904 | −1.7247 | −2.2324 | 0.6753 | D12S2191 |
| 73.451 | 1.0636 | −0.3917 | −1.6882 | −2.2132 | 0.6601 | D12S1632 |
| 74.528 | 1.0229 | −0.3828 | −1.6582 | −2.1704 | 0.6601 | D12S90 |
| 74.775 | 1.0106 | −0.3795 | −1.6517 | −2.1573 | 0.6617 | D12S305 |
| 74.919 | 1.0029 | −0.3773 | −1.648 | −2.1491 | 0.6631 | D12S1298 |
| 75.69 | 0.9563 | −0.363 | −1.6289 | −2.0985 | 0.6753 | D12S1700 |
| 75.691 | 0.9562 | −0.3629 | −1.6288 | −2.0984 | 0.6756 | D12S1056 |
| 75.744 | 0.9527 | −0.3618 | −1.6276 | −2.0946 | 0.6767 | D12S1662 |
| 75.802 | 0.9487 | −0.3605 | −1.6262 | −2.0902 | 0.6779 | D12S83 |
| 75.803 | 0.9487 | −0.3605 | −1.6262 | −2.0902 | 0.6779 | D12S1655 |
| 76.339 | 0.9582 | −0.3657 | −1.6221 | −2.1006 | 0.6682 | D12S298 |
| 76.916 | 0.9668 | −0.3701 | −1.62 | −2.1101 | 0.6606 | D12S1726 |
| 77.789 | 0.9767 | −0.3743 | −1.621 | −2.1209 | 0.6546 | D12S329 |
| 80.622 | 0.7896 | −0.3801 | −1.2958 | −1.9068 | 0.5155 | D12S1649 |
| 83.513 | 0.4582 | −0.2911 | −0.9752 | −1.4527 | 0.4746 | D12S1601 |
| 84.007 | 0.3957 | −0.2648 | −0.9209 | −1.35 | 0.4851 | D12S1294 |
| 84.428 | 0.3441 | −0.2407 | −0.8746 | −1.2588 | 0.5003 | D12S335 |
| 85.558 | 0.2207 | −0.1753 | −0.75 | −1.0081 | 0.573 | D12S313 |
| 86.414 | 0.2075 | −0.1672 | −0.7361 | −0.9775 | 0.5883 | D12S375 |
| 86.588 | 0.2051 | −0.1658 | −0.7331 | −0.9718 | 0.5905 | D12S1680 |
| 87.042 | 0.198 | −0.1615 | −0.7253 | −0.9549 | 0.5991 | D12S1693 |
| 88.586 | 0.1683 | −0.1407 | −0.7008 | −0.8803 | 0.6584 | D12S1040 |
| 89.237 | 0.1545 | −0.1303 | −0.6917 | −0.8436 | 0.6988 | D12S299 |
| 89.238 | 0.1545 | −0.1303 | −0.6917 | −0.8435 | 0.6987 | D12S92 |
| 89.781 | 0.143 | −0.1214 | −0.6848 | −0.8116 | 0.7399 | D12S1052 |
| 90.368 | 0.131 | −0.1118 | −0.6779 | −0.7767 | 0.7921 | D12S337 |
| 91.289 | 0.155 | −0.1175 | −0.7641 | −0.8449 | 0.8534 | D12S1660 |
| 91.913 | 0.087 | −0.0886 | −0.5648 | −0.6331 | 0.8225 | D12S1684 |
| 92.02 | 0.0761 | −0.0831 | −0.5262 | −0.5921 | 0.8142 | D12S350 |
| 93.288 | 0.0009 | −0.0089 | −0.0583 | −0.0652 | 0.8082 | D12S326 |
| 97.989 | 0.2109 | 0.123 | 0.9332 | 0.9855 | 0.8597 | D12S1297 |
| 97.99 | 0.2119 | 0.1234 | 0.9351 | 0.9879 | 0.8588 | D12S106 |
| 97.991 | 0.213 | 0.1237 | 0.9371 | 0.9903 | 0.8578 | D12S1708 |
| 99.524 | 0.6535 | 0.201 | 1.7426 | 1.7347 | 0.9295 | D12S1667 |
| 99.525 | 0.6535 | 0.201 | 1.7427 | 1.7348 | 0.9296 | D12S319 |
| 100.397 | 0.7234 | 0.208 | 1.8684 | 1.8252 | 0.9553 | D12S323 |
| 100.398 | 0.7235 | 0.208 | 1.8686 | 1.8253 | 0.955 | D12S88 |
| 100.399 | 0.7301 | 0.2091 | 1.8758 | 1.8336 | 0.9533 | D12S1719 |
| 100.519 | 0.7536 | 0.2127 | 1.9016 | 1.8629 | 0.947 | D12S1593 |
| 101.064 | 0.8567 | 0.2269 | 2.0196 | 1.9863 | 0.9341 | D12S853 |
| 101.841 | 0.9732 | 0.2384 | 2.1747 | 2.117 | 0.951 | D12S1710 |
| 102.131 | 1.1754 | 0.2589 | 2.4086 | 2.3266 | 0.9561 | D12S1717 |
| 103.423 | 1.1442 | 0.2555 | 2.379 | 2.2955 | 0.9588 | D12S351 |
| 104.343 | 1.341 | 0.2756 | 2.5694 | 2.485 | 0.9479 | D12S311 |
| 104.743 | 1.6769 | 0.3035 | 2.8993 | 2.7789 | 0.952 | D12S95 |
| 105.266 | 1.7384 | 0.3095 | 2.9441 | 2.8294 | 0.9441 | D12S1345 |
| 106.345 | 1.8647 | 0.326 | 2.9793 | 2.9304 | 0.8988 | D12S1346 |
| 110.627 | 2.0063 | 0.3408 | 3.0437 | 3.0397 | 0.8726 | D12S348 |
| 110.908 | 1.9856 | 0.337 | 3.0533 | 3.0239 | 0.8861 | D12S1716 |
| 110.909 | 1.9854 | 0.337 | 3.053 | 3.0238 | 0.886 | D12S1657 |
| 112.477 | 1.3244 | 0.2754 | 2.5394 | 2.4696 | 0.9375 | D12S393 |
| 112.658 | 1.5716 | 0.2988 | 2.7576 | 2.6903 | 0.9246 | D12S1706 |
| 113.456 | 1.482 | 0.2868 | 2.7191 | 2.6125 | 0.9569 | D12S1600 |
| 113.686 | 1.4654 | 0.2856 | 2.7011 | 2.5978 | 0.9556 | D12S346 |
| 114.583 | 1.2538 | 0.2643 | 2.5203 | 2.4029 | 0.9739 | D12S1641 |
| 114.628 | 1.2491 | 0.2637 | 2.5166 | 2.3984 | 0.9748 | D12S306 |
| 114.674 | 1.2445 | 0.2632 | 2.5127 | 2.3939 | 0.9759 | D12S332 |
| 115.043 | 1.3131 | 0.271 | 2.5676 | 2.4591 | 0.9635 | D12S1041 |
| 115.364 | 1.1318 | 0.2546 | 2.3621 | 2.283 | 0.956 | D12S1727 |
| 116.299 | 1.1829 | 0.2606 | 2.4032 | 2.334 | 0.9477 | D12S1607 |
| 116.948 | 1.2361 | 0.2691 | 2.4273 | 2.3859 | 0.9221 | IGF1 |
| 116.949 | 1.2361 | 0.2691 | 2.4273 | 2.3859 | 0.9219 | D12S1030 |
| 117.75 | 1.5059 | 0.2956 | 2.6701 | 2.6334 | 0.9082 | PAH |
| 118.61 | 1.2001 | 0.2629 | 2.4192 | 2.3509 | 0.9435 | D12S360 |
| 118.899 | 1.4558 | 0.2869 | 2.6729 | 2.5893 | 0.9393 | D12S78 |
| 119.188 | 1.399 | 0.2838 | 2.5969 | 2.5382 | 0.9253 | D12S338 |
| 120.067 | 1.3032 | 0.2727 | 2.5213 | 2.4498 | 0.943 | D12S1647 |
| 120.068 | 1.2993 | 0.2723 | 2.5179 | 2.4461 | 0.9436 | D12S317 |
| 120.348 | 1.4722 | 0.2886 | 2.6798 | 2.6038 | 0.9378 | D12S1597 |
| 121.195 | 1.3839 | 0.2842 | 2.5548 | 2.5245 | 0.9127 | D12S1683 |
| 124.023 | 0.6306 | 0.2003 | 1.693 | 1.7041 | 0.9045 | D12S1342 |
| 124.297 | 0.6069 | 0.198 | 1.6474 | 1.6718 | 0.8927 | D12S1613 |
| 125.597 | 0.483 | 0.183 | 1.4221 | 1.4915 | 0.8432 | D12S1605 |
| 126.055 | 0.451 | 0.1786 | 1.3612 | 1.4411 | 0.8293 | D12S84 |
| 126.796 | 0.3855 | 0.1683 | 1.2383 | 1.3324 | 0.8059 | D12S105 |
| 127.545 | 0.3132 | 0.1527 | 1.1129 | 1.2009 | 0.8072 | D12S1583 |
| 129.188 | 0.2211 | 0.1354 | 0.8864 | 1.009 | 0.7362 | D12S1344 |
| 130.64 | 0.141 | 0.1122 | 0.6858 | 0.8058 | 0.6977 | D12S1616 |
| 133.986 | 0.0109 | 0.0313 | 0.1941 | 0.2238 | 0.742 | D12S354 |
| 134.268 | 0.0114 | 0.0321 | 0.1973 | 0.2287 | 0.7353 | D12S1023 |
| 134.818 | 0.0122 | 0.0336 | 0.2027 | 0.237 | 0.7233 | D12S369 |
| 134.959 | 0.0122 | 0.0336 | 0.2019 | 0.2365 | 0.7205 | D12S1602 |
| 135.149 | 0.0121 | 0.0335 | 0.2006 | 0.2356 | 0.7164 | D12S79 |
| 135.367 | 0.0102 | 0.0312 | 0.1829 | 0.217 | 0.7035 | D12S1665 |
| 137.617 | 0.0008 | 0.0093 | 0.0498 | 0.0617 | 0.6492 | D12S1718 |
| 140.815 | 0.0287 | 0.0511 | 0.3109 | 0.3633 | 0.7212 | D12S366 |
| 141.527 | 0.0431 | 0.0638 | 0.374 | 0.4458 | 0.6902 | D12S349 |
| 141.528 | 0.0879 | 0.0897 | 0.5377 | 0.6361 | 0.6935 | D12S1619 |
| 141.755 | 0.0867 | 0.0892 | 0.5334 | 0.6317 | 0.6917 | D12S385 |
| 143.676 | 0.0629 | 0.073 | 0.476 | 0.5383 | 0.7618 | D12S395 |
| 143.677 | 0.0629 | 0.073 | 0.4759 | 0.5382 | 0.7615 | D12S321 |
| 143.678 | 0.0629 | 0.073 | 0.4759 | 0.5381 | 0.7613 | D12S1721 |
| 143.824 | 0.0588 | 0.0707 | 0.4601 | 0.5205 | 0.7614 | D12S1666 |
| 144.632 | 0.0428 | 0.0604 | 0.3929 | 0.444 | 0.7652 | D12S2073 |
| 144.962 | 0.0437 | 0.0611 | 0.3961 | 0.4485 | 0.7621 | D12S1349 |
| 145.291 | 0.037 | 0.0563 | 0.3644 | 0.4128 | 0.7628 | D12S1603 |
| 145.426 | 0.0331 | 0.0534 | 0.3446 | 0.3907 | 0.7623 | D12S378 |
| 149.447 | 0.0134 | −0.0352 | −0.2159 | −0.2483 | 0.7658 | D12S1614 |
| 149.448 | 0.0134 | −0.0352 | −0.2158 | −0.2483 | 0.7656 | D12S342 |
| 152.517 | 0.0049 | −0.0224 | −0.124 | −0.1505 | 0.6847 | D12S324 |
| 153.404 | 0.0009 | −0.0099 | −0.0509 | −0.064 | 0.6328 | D12S1634 |
| 153.405 | 0.0009 | −0.0098 | −0.0507 | −0.0638 | 0.6382 | D12S307 |
| 154.88 | 0.0244 | 0.0534 | 0.2534 | 0.3353 | 0.561 | D12S1658 |
| 155.819 | 0.0768 | 0.0941 | 0.447 | 0.5948 | 0.549 | GATA41E12 |
| 155.94 | 0.0855 | 0.0991 | 0.472 | 0.6275 | 0.5489 | D12S2078 |
| 157.397 | 0.0566 | 0.0832 | 0.3729 | 0.5104 | 0.5228 | D12S1675 |
| 159.342 | 0.0829 | 0.0973 | 0.4654 | 0.6179 | 0.5526 | D12S1679 |
| 161.157 | 0.1143 | 0.1111 | 0.5609 | 0.7255 | 0.5776 | D12S1609 |
| 163.425 | 0.1165 | 0.1067 | 0.5964 | 0.7324 | 0.6407 | D12S834 |
| 163.559 | 0.1167 | 0.1063 | 0.5993 | 0.733 | 0.6461 | D12S1659 |
| 165.72 | 0.175 | 0.1287 | 0.7383 | 0.8977 | 0.6479 | D12S1714 |
| 165.721 | 0.175 | 0.1287 | 0.7383 | 0.8978 | 0.648 | D12S367 |
| 168.245 | 0.1739 | 0.132 | 0.7137 | 0.8949 | 0.6107 | D12S2069 |
| 168.246 | 0.1739 | 0.132 | 0.7138 | 0.8949 | 0.6105 | D12S97 |
| 170.298 | 0.2145 | 0.1514 | 0.7627 | 0.9938 | 0.5626 | D12S343 |
| 170.824 | 0.2262 | 0.156 | 0.78 | 1.0207 | 0.5566 | D12S1599 |
| 171.817 | 0.2496 | 0.1638 | 0.8178 | 1.0722 | 0.5531 | D12S392 |
| 173.734 | 0.2978 | 0.1751 | 0.9099 | 1.171 | 0.5715 | D12S1723 |
| 175.333 | 0.2667 | 0.1709 | 0.8351 | 1.1083 | 0.5393 | D12S357 |
| 175.456 | 0.2648 | 0.1707 | 0.8307 | 1.1043 | 0.5372 | D12S1638 |
| 176.211 | 0.2665 | 0.1772 | 0.8027 | 1.1079 | 0.4984 | D12S2343 |

[0456] TABLE 37

| Build34 | Build34 | Marker | Marker | | Public | | Minor | Minor | position in |
|---|---|---|---|---|---|---|---|---|---|
| start | stop | name | alias | IUPAC | SNP | Variation | allele | allele % | Sequence |
| 94877218 | 94877218 | SG12S432 | | R | rs2270318 | A/G | A | 12.75 | 7218 |
| 94885285 | 94885285 | SG12S438 | | S | rs2268517 | C/G | G | 9.36 | 15285 |
| 94896055 | 94896055 | SG12S16 | LTA4H_3645 | Y | | C/T | T | 22.64 | 26055 |
| 94896115 | 94896115 | SG12S56 | LTA4H_3705 | K | | G/T | G | 4.14 | 26115 |
| 94896339 | 94896339 | SG12S57 | LTA4H_3929 | Y | | C/T | C | 2.5 | 26339 |
| 94896351 | 94896351 | SG12S58 | LTA4H_3941 | S | | C/G | C | 0.85 | 26351 |
| 94896393 | 94896393 | SG12S37 | LTA4H_3983 | W | | A/T | T | 9.3 | 26393 |
| 94896705 | 94896705 | SG12S59 | LTA4H_4295 | R | | A/G | A | 4.5 | 26705 |
| 94896786 | 94896786 | SG12S60 | LTA4H_4376 | R | | A/G | A | 2.87 | 26786 |
| 94896832 | 94896832 | SG12S61 | LTA4H_4422 | R | | A/G | G | 1.56 | 26832 |
| 94896897 | 94896897 | SG12S29 | LTA4H_4487 | W | | A/T | T | 4.26 | 26897 |
| 94896985 | 94896985 | SG12S17 | LTA4H_4575 | R | rs11108372 | A/G | A | 41.41 | 26985 |
| 94897845 | 94897845 | SG12S62 | LTA4H_5435 | Y | | C/T | C | 1.17 | 27845 |
| 94898878 | 94898878 | SG12S63 | LTA4H_6468 | Y | | C/T | T | 4.46 | 28878 |
| 94899057 | 94899057 | SG12S64 | LTA4H_6647 | Y | | C/T | C | 2.99 | 29057 |
| 94899549 | 94899549 | SG12S18 | LTA4H_7139 | W | | A/T | A | 21.72 | 29549 |
| 94900318 | 94900318 | SG12S19 | LTA4H_7908 | W | | A/T | A | 10.9 | 30318 |
| 94900639 | 94900639 | SG12S65 | LTA4H_8229 | K | | G/T | G | 5.09 | 30639 |
| 94900892 | 94900892 | SG12S66 | LTA4H_8482 | R | | A/G | G | 0.59 | 30892 |
| 94901997 | 94901997 | SG12S68 | LTA4H_9587 | W | | A/T | T | 3.63 | 31997 |
| 94902169 | 94902169 | SG12S69 | LTA4H_9759 | W | | A/T | A | 0.88 | 32169 |
| 94902337 | 94902337 | SG12S70 | LTA4H_9927 | M | | A/C | A | 24.09 | 32337 |
| 94902454 | 94902454 | SG12S71 | LTA4H_10044 | Y | | C/T | C | 20.93 | 32454 |
| 94902928 | 94902928 | SG12S72 | LTA4H_10518 | Y | | C/T | T | 1.35 | 32928 |
| 94903037 | 94903037 | SG12S30 | LTA4H_10627 | W | rs2540498 | A/T | A | 22.36 | 33037 |
| 94903300 | 94903300 | SG12S73 | LTA4H_10890 | Y | rs2300559 | C/T | C | 2.33 | 33300 |
| 94903618 | 94903618 | SG12S20 | LTA4H_11208 | M | | A/C | C | 39.08 | 33618 |
| 94903720 | 94903720 | SG12S21 | LTA4H_11310 | R | rs2660880 | A/G | A | 5.95 | 33720 |
| 94905002 | 94905002 | SG12S38 | LTA4H_12592 | Y | rs2110762 | C/T | C | 34.92 | 35002 |
| 94905216 | 94905216 | SG12S74 | LTA4H_12806 | Y | | C/T | T | 0.8 | 35216 |
| 94905667 | 94905667 | SG12S22 | LTA4H_13257 | R | rs2072510 | A/G | A | 36.88 | 35667 |
| 94905821 | 94905821 | SG12S75 | LTA4H_13411 | Y | | C/T | T | 1.39 | 35821 |
| 94906078 | 94906078 | SG12S23 | LTA4H_13668 | Y | | C/T | C | 7.06 | 36078 |
| 94906362 | 94906362 | SG12S31 | LTA4H_13952 | Y | | C/T | T | 5.67 | 36362 |
| 94906457 | 94906457 | SG12S76 | LTA4H_14047 | W | rs10492226 | A/T | A | 1.18 | 36457 |
| 94906743 | 94906743 | SG12S77 | LTA4H_14333 | W | | A/T | A | 24.77 | 36743 |
| 94907375 | 94907375 | SG12S78 | LTA4H_14965 | Y | | C/T | T | 2.48 | 37375 |
| 94907545 | 94907545 | SG12S24 | LTA4H_15135 | Y | rs2660900 | C/T | C | 23.76 | 37545 |
| 94907935 | 94907935 | SG12S79 | LTA4H_15525 | S | | C/G | C | 0.83 | 37935 |
| 94908971 | 94908971 | SG12S32 | LTA4H_16561 | R | rs2540496 | A/G | A | 31.11 | 38971 |
| 94909012 | 94909012 | SG12S80 | LTA4H_16602 | W | | A/T | A | 0.74 | 39012 |
| 94909191 | 94909191 | SG12S39 | LTA4H_16781 | K | rs2540495 | G/T | T | 30.74 | 39191 |
| 94909554 | 94909554 | SG12S81 | LTA4H_17144 | R | rs12319438 | A/G | G | 4.12 | 39554 |
| 94910164 | 94910164 | SG12S82 | LTA4H_17754 | R | | A/G | A | 0.4 | 40164 |
| 94910246 | 94910246 | SG12S83 | LTA4H_17836 | W | | A/T | T | 1.21 | 40246 |
| 94910273 | 94910273 | SG12S84 | LTA4H_17863 | R | | A/G | A | 2.82 | 40273 |
| 94911669 | 94911669 | SG12S25 | LTA4H_19259 | R | rs1978331 | A/G | G | 31.68 | 41669 |
| 94911781 | 94911781 | SG12S85 | LTA4H_19371 | Y | | C/T | T | 1.25 | 41781 |
| 94914296 | 94914296 | SG12S40 | LTA4H_21886 | W | rs7959337 | A/T | A | 5.29 | 44296 |
| 94916236 | 94916236 | SG12S86 | LTA4H_23826 | R | | A/G | G | 4.71 | 46236 |
| 94916445 | 94916445 | SG12S87 | LTA4H_24035 | Y | | C/T | T | 1.27 | 46445 |
| 94916452 | 94916452 | SG12S88 | LTA4H_24042 | R | rs1990611 | A/G | A | 33.76 | 46452 |
| 94916805 | 94916805 | SG12S89 | LTA4H_24395 | R | rs7981011 | A/G | G | 4.91 | 46805 |
| 94916919 | 94916919 | SG12S26 | LTA4H_24509 | Y | | C/T | C | 17.16 | 46919 |
| 94917444 | 94917444 | SG12S90 | LTA4H_25034 | R | | A/G | A | 0.84 | 47444 |
| 94918851 | 94918851 | SG12S91 | LTA4H_26441 | Y | rs2660838 | C/T | C | 25 | 48851 |
| 94919176 | 94919176 | SG12S92 | LTA4H_26766 | Y | | C/T | C | 20.44 | 49176 |
| 94919667 | 94919667 | SG12S93 | LTA4H_27257 | R | rs2268516 | A/G | A | 2.44 | 49667 |
| 94920368 | 94920368 | SG12S94 | LTA4H_27958 | Y | rs2660839 | C/T | C | 31.82 | 50368 |
| 94921763 | 94921763 | SG12S41 | LTA4H_29353 | Y | | C/T | C | 20.35 | 51763 |
| 94921923 | 94921923 | SG12S95 | LTA4H_29513 | R | rs4441106 | A/G | G | 7.07 | 51923 |
| 94922409 | 94922409 | SG12S96 | LTA4H_29999 | R | rs763875 | A/G | A | 5.92 | 52409 |
| 94922502 | 94922502 | SG12S97 | LTA4H_30092 | Y | rs763876 | C/T | T | 2.1 | 52502 |
| 94922681 | 94922681 | SG12S98 | LTA4H_30271 | Y | rs763874 | C/T | C | 32.42 | 52681 |
| 94923446 | 94923446 | SG12S42 | LTA4H_31036 | Y | rs2660892 | C/T | C | 27.41 | 53446 |
| 94923744 | 94923744 | SG12S55 | LTA4H_31334 | R | | A/G | A | 0.27 | 53744 |
| 94924037 | 94924037 | SG12S99 | LTA4H_31627 | R | | A/G | A | 4.37 | 54037 |
| 94924845 | 94924845 | SG12S100 | LTA4H_32435 | Y | rs2247570 | C/T | C | 27.79 | 54845 |
| 94924938 | 94924938 | SG12S101 | LTA4H_32528 | R | | A/G | A | 1.5 | 54938 |
| 94925915 | 94925915 | SG12S33 | LTA4H_33505 | Y | rs2660895 | C/T | C | 30.71 | 55915 |
| 94926590 | 94926590 | SG12S34 | LTA4H_34180 | Y | rs2247330 | C/T | C | 30.9 | 56590 |
| 94926724 | 94926724 | SG12S102 | LTA4H_34314 | R | rs2247323 | A/G | G | 31.85 | 56724 |
| 94926915 | 94926915 | SG12S103 | LTA4H_34505 | Y | rs2247313 | C/T | T | 32.74 | 56915 |
| 94927010 | 94927010 | SG12S104 | LTA4H_34600 | Y | rs2247309 | C/T | C | 32.74 | 57010 |
| 94927133 | 94927133 | SG12S27 | LTA4H_34723 | Y | rs2247304 | C/T | C | 25.57 | 57133 |
| 94927900 | 94927900 | SG12S35 | LTA4H_35490 | R | rs2660897 | A/G | A | 35.93 | 57900 |
| 94927959 | 94927959 | SG12S105 | LTA4H_35549 | Y | rs11108381 | C/T | T | 2.4 | 57959 |
| 94928465 | 94928465 | SG12S28 | LTA4H_36055 | K | rs2660898 | G/T | G | 29.36 | 58465 |
| 94928740 | 94928740 | SG12S36 | LTA4H_36330 | Y | rs2540490 | C/T | T | 31 | 58740 |
| 94928970 | 94928970 | SG12S106 | LTA4H_36560 | Y | rs2540489 | C/T | C | 30.89 | 58970 |
| 94929183 | 94929183 | SG12S107 | LTA4H_36773 | Y | rs11108382 | C/T | T | 2.58 | 59183 |
| 94929213 | 94929213 | SG12S108 | LTA4H_36803 | R | rs2540488 | A/G | A | 26.28 | 59213 |
| 94929761 | 94929761 | SG12S109 | LTA4H_37351 | Y | rs2300557 | C/T | T | 4.76 | 59761 |
| 94929770 | 94929770 | SG12S110 | LTA4H_37360 | W | rs2246990 | A/T | A | 28.57 | 59770 |
| 94929936 | 94929936 | SG12S111 | LTA4H_37526 | W | | A/T | A | 2.81 | 59936 |
| 94930044 | 94930044 | SG12S112 | LTA4H_37634 | M | | A/C | C | 46.15 | 60044 |
| 94930343 | 94930343 | SG12S43 | LTA4H_37933 | K | rs2246973 | G/T | G | 32.93 | 60343 |
| 94930357 | 94930357 | SG12S113 | LTA4H_37947 | Y | rs2246972 | C/T | T | 33.54 | 60357 |
| 94931246 | 94931246 | SG12S114 | LTA4H_38836 | K | | G/T | T | 7.55 | 61246 |
| 94934775 | 94934775 | SG12S141 | | R | rs10777768 | A/G | | | 64775 |
| 94934975 | 94934975 | SG12S140 | | M | rs2660840 | A/C | C | 29.77 | 64975 |
| 94937348 | 94937348 | SG12S143 | | Y | rs2540482 | C/T | C | 17.02 | 67348 |
| 94941021 | 94941021 | SG12S144 | | R | rs2660845 | A/G | G | 19.43 | 71021 |
| 94943761 | 94943761 | SG12S221 | | R | rs2540475 | A/G | A | 16.92 | 73761 |
| 94946089 | 94946089 | SG12S222 | | Y | rs2660850 | C/T | C | 15.47 | 76089 |
| 94948016 | 94948016 | SG12S460 | | M | RS2660852 | A/C | A | 37.22 | 78016 |
| 94949965 | 94949965 | SG12S223 | | Y | rs2660875 | C/T | C | 43.79 | 79965 |
| 94950568 | 94950568 | SG12S224 | | R | rs2540473 | A/G | G | 6.12 | 80568 |
| 94952847 | 94952847 | SG12S225 | | R | rs2540472 | A/G | A | 5.63 | 82847 |
| 94953483 | 94953483 | SG12S226 | | S | rs2540471 | C/G | C | 37.7 | 83483 |
| 94953798 | 94953798 | SG12S227 | | R | | A/G | | | 83798 |
| 94953801 | 94953801 | SG12S228 | | Y | rs2660890 | C/T | T | 46.96 | 83801 |
| 94953831 | 94953831 | SG12S229 | | M | rs2660889 | A/C | | | 83831 |
| 94954155 | 94954155 | SG12S230 | | R | rs2660888 | A/G | A | 35.68 | 84155 |
| 94954449 | 94954449 | SG12S231 | | Y | rs4762661 | C/T | | | 84449 |
| 94958156 | 94958156 | SG12S232 | | Y | | C/T | | | 88156 |
| 94958339 | 94958339 | SG12S233 | | Y | rs2660885 | C/T | T | 15.18 | 88339 |
| 94962388 | 94962388 | SG12S234 | | R | rs5800242 | A/G | | | 92388 |
| 94962435 | 94962435 | SG12S235 | | Y | rs759391 | C/T | | | 92435 |
| 94963320 | 94963320 | SG12S236 | | S | rs2540467 | C/G | | | 93320 |
| 94963655 | 94963655 | SG12S237 | | Y | rs2540466 | C/T | T | 37.05 | 93655 |
| 94963774 | 94963774 | SG12S238 | | Y | rs10492225 | C/T | | | 93774 |
| 94964298 | 94964298 | SG12S239 | | W | rs2660874 | A/T | | | 94298 |
| 94966584 | 94966584 | SG12S240 | | W | rs2540461 | A/T | | | 96584 |

[0457] TABLE 38A
Haplotype association analysis including SNPs and microsatellite markers across the LTA4H gene.

| | | | | | | | | | |
|---|---|---|---|---|---|---|---|---|---|
| DG12S1664 | SG12S16 | SG12S17 | SG12S18 | SG12S21 | SG12S22 | SG12S23 | SG12S24 | SG12S25 | SG12S26 |

All MI vs
controls

| | | | | | | | | | | |
|---|---|---|---|---|---|---|---|---|---|---|
| short | 0 | C | A | T | G | G | T | T | A | T |
| form | 0 | | | | | | | | | T |

MI males vs controls

| | | | | | | | | | | |
|---|---|---|---|---|---|---|---|---|---|---|
| short | 0 | C | A | T | G | G | T | T | A | T |
| form | 0 | | | | | | | | | T |

MI females vs controls

| | | | | | | | | | | |
|---|---|---|---|---|---|---|---|---|---|---|
| short | 0 | C | A | T | G | G | T | T | A | T |
| form | 0 | | | | | | | | | T |

Recurrent MI vs controls

| | | | | | | | | | | |
|---|---|---|---|---|---|---|---|---|---|---|
| short | 0 | C | A | T | G | G | T | T | A | T |
| form | 0 | | | | | | | | | T |

| | | | | | | | | | |
|---|---|---|---|---|---|---|---|---|---|
| DG12S1666 | SG12S100 | SG12S28 | SG12S144 | p-val | r | #aff | aff.frq. | #con | con.frq. |

All MI vs
controls

| | | | | | | | | | | |
|---|---|---|---|---|---|---|---|---|---|---|
| short | 0 | T | T | A | 1.67E−02 | 1.24 | 590 | 0.49 | 481 | 0.44 |
| form | 0 | | | A | 3.20E−03 | 1.32 | 590 | 0.5 | 480 | 0.43 |

MI males vs controls

| | | | | | | | | | | |
|---|---|---|---|---|---|---|---|---|---|---|
| short | 0 | T | T | A | 5.10E−03 | 1.34 | 361 | 0.51 | 481 | 0.44 |
| form | 0 | | | A | 1.50E−03 | 1.4 | 361 | 0.51 | 480 | 0.43 |

MI females vs controls

| | | | | | | | | | | |
|---|---|---|---|---|---|---|---|---|---|---|
| short | 0 | T | T | A | 3.80E−01 | 1.11 | 229 | 0.46 | 481 | 0.44 |
| form | 0 | | | A | 1.35E−01 | 1.2 | 229 | 0.47 | 480 | 0.43 |

Recurrent MI vs controls

| | | | | | | | | | | |
|---|---|---|---|---|---|---|---|---|---|---|
| short | 0 | T | T | A | 1.50E−02 | 1.51 | 88 | 0.54 | 481 | 0.44 |
| form | 0 | | | A | 2.40E−03 | 1.69 | 88 | 0.56 | 480 | 0.43 |

[0458] TABLE 38B

Information on miCrosatellite markers that were
used in the haplotype assoCiation analysis shown
in TABLE 38A.

| Marker Name | DG12S1664 |
|---|---|
| Chr | 12 |
| Cytoband | q23.1 |
| Start in SEQ_ID_NO_718 | 7855 |
| (bp) | |
| NCBI_build33Start (Mb) | 96.317853 |
| Size | 238 |
| CEPH standard | 245 |
| (referenCe allele) | |
| Polymorphism type | SNP |
| Polymorphism Class | in-del |
| Heterozygosity ratio | 0.23 |
| Forward primer | GGAAGGAGGACACTTCTGGA |
| | (SEQ ID NO:721) |
| Reverse primer | GCTGTGAATGGCTAAACTTGG |
| | (SEQ ID NO:722) |
| Marker Name | DG12S1666 |
| Chr | 12 |
| Cytoband | q23.1 |
| Start in SEQ_ID_NO_718 | 38342 |
| (bp) | |
| NCBI_build33Start (Mb) | 96.34834 |
| Size | 188 |
| CEPH standard | 193 |
| (referenCe allele) | |
| Polymorphism type | MiCrosatellite |
| Polymorphism Class | Di |
| Heterozygosity ratio | 0.52 |
| Forward primer | CACAGAAGCTGCAGTGGAAG |
| | (SEQ ID NO:723) |
| Reverse primer | CAAATGGAGGAGTCAAGACCA |
| | (SEQ ID NO:724) |
| Marker Name | DG12S1668 |
| Chr | 12 |
| Cytoband | q23.1 |
| Start in SEQ_ID_NO_718 | 86595 |
| (bp) | |
| NCBI_build33Start (Mb) | 96.396593 |
| Size | 398 |
| CEPH standard | 398 |
| (referenCe allele) | |
| Polymorphism type | MiCrosatellite |
| Polymorphism Class | Di |
| Heterozygosity ratio | 0.72 |
| Forward primer | GCAGTTTAAGCTGTATGTATATGAGG |
| | SEQ ID NO:725) |
| Reverse primer | TGAAAGCCATCACTGTAAGGA |
| | (SEQ ID NQ:726) |

[0459] TABLE 39
Haplotype association analysis including SNPs and microsatellite markers in the LTA4H
gene region.

| | | | | | | | | |
|---|---|---|---|---|---|---|---|---|
| SG12S438 | DG12S1664 | SG12S16 | SG12S21 | SG12S23 | SG12S25 | SG12S26 | DG12S1666 | SG12S100 |

All MI vs controls

| | | | | | | | | | |
|---|---|---|---|---|---|---|---|---|---|
| Consecutive | C | 0 | C | G | T | A | T | 0 | T |
| Short version | C | 0 | | | | | | | |
| Protective variant | C | | C | | | | T | | |

MI males vs controls

| | | | | | | | | | |
|---|---|---|---|---|---|---|---|---|---|
| Consecutive | C | 0 | C | G | T | A | T | 0 | T |
| Short version | C | 0 | | | | | | | |
| Protective variant | C | | C | | | | T | | |

MI females vs controls

| | | | | | | | | | |
|---|---|---|---|---|---|---|---|---|---|
| Consecutive | C | 0 | C | G | T | A | T | 0 | T |
| Short version | C | 0 | | | | | | | |
| Protective variant | C | | C | | | | T | | |

Recurrent MI vs controls

| | | | | | | | | | |
|---|---|---|---|---|---|---|---|---|---|
| Consecutive | C | 0 | C | G | T | A | T | 0 | T |
| Short version | C | 0 | | | | | | | |
| Protective variant | C | | C | | | | T | | |

MI plus stroke or PAOD vs controls

| | | | | | | | | | |
|---|---|---|---|---|---|---|---|---|---|
| Consecutive | C | 0 | C | G | T | A | T | 0 | T |
| Short version | C | 0 | | | | | | | |
| Protective variant | C | | C | | | | T | | |

| | | | | | | | |
|---|---|---|---|---|---|---|---|
| SG12S28 | SG12S143 | SG12S144 | SG12S221 | SG12S222 | SG12S223 | SG12S225 | SG12S226 |

All MI vs controls

| | | | | | | | | |
|---|---|---|---|---|---|---|---|---|
| Consecutive | T | T | A | G | C | C | G | G |
| Short version | | | | | C | | | G |
| Protective variant | | T | | | | | | |

MI males vs controls

| | | | | | | | | |
|---|---|---|---|---|---|---|---|---|
| Consecutive | T | T | A | G | C | C | G | G |
| Short version | | | | | C | | | G |
| Protective variant | | T | | | | | | |

MI females vs controls

| | | | | | | | | |
|---|---|---|---|---|---|---|---|---|
| Consecutive | T | T | A | G | C | C | G | G |
| Short version | | | | | C | | | G |
| Protective variant | | T | | | | | | |

Recurrent MI vs controls

| | | | | | | | | |
|---|---|---|---|---|---|---|---|---|
| Consecutive | T | T | A | G | C | C | G | G |
| Short version | | | | | C | | | G |
| Protective variant | | T | | | | | | |

MI plus stroke or PAOD vs controls

| | | | | | | | | |
|---|---|---|---|---|---|---|---|---|
| Consecutive | T | T | A | G | C | C | G | G |
| Short version | | | | | C | | | G |
| Protective variant | | T | | | | | | |

| | | | | | | | | | |
|---|---|---|---|---|---|---|---|---|---|
| SG12S233 | SG12S237 | DG12S1668 | p-val | P-val adj. | r | #aff | aff.frq. | #con | con.frq. |

All MI vs controls

| | | | | | | | | | |
|---|---|---|---|---|---|---|---|---|---|
| Consecutive | C | T | 0 | 6.2E−02 | 1.34 | 1560 | 0.051 | 953 | 0.039 |
| Short version | | | 0 | 1.5E−03 | 1.63 | 1556 | 0.071 | 951 | 0.045 |
| Protective variant | | C | | 7.5E−02 | 0.88 | 1557 | 0.290 | 951 | 0.317 |

MI males vs controls

| | | | | | | | | | |
|---|---|---|---|---|---|---|---|---|---|
| Consecutive | C | T | 0 | 2.2E−02 | 1.49 | 1096 | 0.051 | 953 | 0.035 |
| Short version | | | 0 | 3.1E−03 | 1.66 | 1093 | 0.069 | 951 | 0.043 |
| Protective variant | | C | | 6.3E−02 | 0.86 | 1094 | 0.283 | 951 | 0.314 |

MI females vs controls

| | | | | | | | | | |
|---|---|---|---|---|---|---|---|---|---|
| Consecutive | C | T | 0 | 4.3E−01 | 1.19 | 464 | 0.046 | 953 | 0.039 |
| Short version | | | 0 | 1.6E−02 | 1.60 | 463 | 0.073 | 951 | 0.047 |
| Protective variant | | C | | 3.1E−01 | 0.91 | 463 | 0.301 | 951 | 0.322 |

Recurrent MI vs controls

| | | | | | | | | | |
|---|---|---|---|---|---|---|---|---|---|
| Consecutive | C | T | 0 | 7.7E−02 | 1.52 | 273 | 0.060 | 953 | 0.040 |
| Short version | | | 0 | 7.5E−02 | 1.54 | 272 | 0.067 | 951 | 0.045 |
| Protective variant | | C | | 9.8E−02 | 0.82 | 273 | 0.274 | 951 | 0.316 |

MI plus stroke or PAOD vs controls

| | | | | | | | | | | |
|---|---|---|---|---|---|---|---|---|---|---|
| Consecutive | C | T | 0 | 1.5E−03 | 0.007 | 1.97 | 325 | 0.073 | 953 | 0.038 |
| Short version | | | 0 | 2.4E−05 | 0.038 | 2.39 | 325 | 0.099 | 951 | 0.044 |
| Protective variant | | C | | 4.1E−05 | | 0.61 | 325 | 0.220 | 951 | 0.315 |

P-val = p-value.
P-val adj: P-value adjusted for multiple comparisons.
r = Relative risk.
#aff = Number of patients.
#con = number of controls.
Aff.frq = haplotype/allelic frequency in patients.
Con.frq = haplotype/allelic frequency in controls.

### Discussion

[0460] In a genome wide search for susceptibility genes for MI, a gene was mapped to 12q23. This locus was fine mapped with microsatellite markers. Haplotype analysis in a large case-control association study using markers spanning a 79 kb region across the LTA4H gene, shows that LTA4H is a significant susceptibility gene for MI.

[0461] The LTA4H gene encodes a protein that is required for leukotriene B4 synthesis. The leukotrienes are potent inflammatory lipid mediators derived from arachidonic acid. Given that our data shows that LTA4H shows significant association to MI, it may contribute to development of atherosclerosis in coronary arteries and/or to the destabilization of existing coronary atherosclerotic plaques through lipid oxidation and/or proinflammatory effects.

[0462] Dashwood and coworkers have studied expression of the enzymes that control the formation of leukotrienes in coronary arteries. They showed that cells showing positive antibody binding to 5-LO, FLAP (5-lipoxygenase activating protein), and leukotriene A4 hydrolase were present in the coronary arteries and had a similar distribution to macrophages. (Dashwood, et al., Circulation 1998 Jun. 23;97(24):2406-13). Thus, LTA4H and other members of the leukotriene pathway are expressed within cell types found in atherosclerotic lesions that form the basis for the final event of myocardial infarction. Their potential role in plaque instability may explain why many patients have stable angina for years without suffering a myocardial infarction (and therefore presumably have atherosclerotic lesions without the instability that leads to overriding thrombosis and MI) while others suffer MI with little or no period of stable angina. Those patients with elevated LTA4H enzymatic activity in atherosclerotic lesions may have more unstable plaques and higher MI rates. In addition, increased LTA4H activity may accelerate atherosclerosis lesion formation and progression.

[0463] This LTA4H data complements data presented above on the gene that encodes FLAP, which works with 5-LO to produce Leukotriene A4; that is, it is upstream of LTA4H. We found that variants in the FLAP gene more than double the risk of MI. LTA4H represents the second member of the leukotriene biosynthetic pathway that we have been the first to show confers substantially higher risk for MI.

[0464] Further work in animals which supports our discovery that LTA4H is a disease gene for MI comes from Aiello and coworkers. They have shown that leukotriene B4 receptor antagonism reduces monocytic foam cells in mice, suggesting that LTB4 has a role in the pathogenesis of atherosclerosis in mice. (Aiello, et al., Arteriosclerosis, Thrombosis and Vascular Biology. 2002;22:443.)

[0465] Finally, additional support of our human validation of the leukotriene pathways role in MI in general, and for LTA4H, in particular, comes from Mehrabian et al. who described the identification of 5-Lipoxygenase (5-LO) as a major gene contributing to atherosclerosis susceptibility in mice. Mehrabian et al. described that heterozygous deficiency for the enzyme in a knockout model decreased the atherosclerotic lesion size in LDL−/− mice by about 95%. Mehrabian et al show that the enzyme is expressed abundantly in macrophage-rich regions of atherosclerotic lesions, and suggested that 5-LO and/or its products might act locally to promote lesion development (Mehrabian et al., Circulation Research. 91:120 (2002)).

[0466] These results suggest that the Leukotriene B4 branch of the leukotriene pathway (as opposed to the other main end products of the leukotriene biosynthetic pathway: leukotriene C4, leukotriene D4, and leukotriene E4) may be more specifically involved in MI risk. If so, then medicants acting on this branch or blocking the effects of LTB4 may be more effective in preventing/treating MI than : those acting on the other branches of the pathway or that block the effects of LTC4, LTD4, or LTE4. However, our current data do not exclude these other branches of the leukotriene pathway; the data do suggest that at least the LTB4 side of the leukotriene pathway is important for MI. All medicaments that act on any branch of the pathway are contemplated herein for MI prophylaxis or therapy.

[0467] Mutations and /or polymorphisms within or near the LTA4H nucleic acid, and other members of the same pathway (i.e., leukotriene B4 receptor 1 and 2, leukotriene B4 omega-hydroxylase, leukotriene B4 12-hydroxydehydrogenase), that show association with the disease, may be used as a diagnostic test to predict those at risk for MI and ACS as well as those who might benefit from medicants directed against members of the leukotriene pathway. Therefore, there may be other members of the leukotriene pathway that may be valuable therapeutic targets for myocardial infarction in addition to LTA4H and FLAP.

### EXAMPLE 16

### mRNA Expression of the LTA4 Hydrolase Gene in White Blood Cells of MI Patients vs Control

[0468] mRNA expression was compared in white blood cells from patients with history of myocardial infarction (MI) and in age and sex matched controls without MI. The leucocyte population was separated into: 1) neutrophils and 2) peripheral blood mononuclear cells prior to RNA extraction using standardized methods as previously described (Helgadottir et al, Nature Genetics, 2004; Hakonarson et al, J Immunol, 2001).

[0469] RNA was isolated from PBM cells obtainted from 43 MI patients and 35 controls. RNA was separately analyzed from granulocytes from the same subjects. Sufficient amount for RNA was obtained from all PBM cell preparations, and granulocyte preparations from 35 MI patients and 29 controls. RNA was converted into cDNA using the protocol below. PCR was then run on the cDNA with the LTA4H Assay-on-Demand and Beta Actin Pre-Developed Assay Reagent from Applied Biosystems using the PCR parameters below.

TABLE 40
PCR Parameters

| RT Reaction | | | | |
|---|---|---|---|---|
| TaqMan RT Buffer | 1× | | | |
| MgCl2 | 5.5 | mM | | |
| dNTP | 0.5 | mM per dNTP | 25° C. | 10′ |
| Random Hexamers | 2.5 | uM | 48° C. | 30′ |
| Rnase Inhibitor | 0.4 | U/uL | 95° C. | 5′ |
| MultiScribe | 1.25 | U/uL | | |
| Reverse | | | | |
| Transcriptase | | | | |
| RNA | 2 | ng/uL | | |
| | 50 | uL Reaction Volume | | |
| PCR Reaction | | | | |
| TaqMan Universal | 1× | | 95° C. | 10′ |
| Master Mix | | | | |
| TaqManAssay (20×) | 1× | | 40 cycles: | |
| cDNA | 2 | ng/ul (original RNA) | 95° C. | 15″ |
| | 10 | uL Reaction Volume | 60° C. | 60″ |

All PCR reactions run in duplicates.

[0470] ABI7900 instrument was used to calculate CT (Threshold Cycle) values. Samples displaying a greater than I deltaCT between duplicates were not used in our analysis. Quantity was obtained using the formula 2ˆ-deltaCT where deltaCT represents the difference of CT values between target and housekeeping assay. mRNA expression was subsequently compared between patients and controls. To determine if there were differences between the groups, we used standardized Mann-Whitney analysis as well as Standard t tests, with p<0.05 considered significant. Moreover, given our hypothesis of enhanced expression of the LTA4 hydrolase gene in patients compared to controls, we report both unpaired two-sided and unpaired one-sided t tests with Welch correction.

TABLE 41
Results
Analysis

| | # | # 5% extr. | Ave Q −5% extr. |
|---|---|---|---|
| PBMC | | | |
| Patients | 43 | 2.15 | 1.954317191 |
| Controls | 35 | 1.75 | 1.72766267 |
| Granulocytes | | | |
| Patients | 35 | 1.75 | 0.401265947 |
| Controls | 29 | 1.45 | 0.331226464 |

Statistics Granulocytes MI patients vs controls
P = 0.0868
Mann-Whitney
two-sided test
P = 0.0635 Unpaired two-sided t test
P = 0.0318 Unpaired one-sided t test
P = 0.0556 Unpaired two-sided t test with Welch correction
P = 0.0278 Unpaired one-sided t test with Welch correction
Statistics PBMC Patients vs Control
P = 0.0456 Mann-Whitney two-sided test
P = 0.0591 Unpaired two-sided t test
P = 0.0296 Unpaired one-sided t test
P = 0.0656 Unpaired two-sided t test with Welch correction
P = 0.0328 Unpaired one-sided t test with Welch correction

[0471] Relative to cells isolated from control subjects, mRNA expression of LTA4 hydrolase gene is significantly enhanced in both PBM cells and granulocytes isolated from patients with MI. These data further confirmed the role of this gene in MI.

### EXAMPLE 17

### SNPs in the LTA4H Gene and Haplotype Association

[0472] Ten SNPs in the LTA4H gene, 8 from the sequenced region and 2 public SNPs in the 5′ region of the gene, were selected for genotyping 1500 MI patients and 900 controls. The linkage disequilibrium (LD) pattern defined by the 10 genotyped SNPs is shown in FIG. 13a. All haplotypes with greater than 1% allelic frequency that were found in the Icelandic cohort are shown in FIG. 13b.

### Subjects from Icelans

[0473] The study cohort included 1496 unrelated Icelandic subjects with MI (1096 males, 400 females, and 432 with early onset MI), and 867 unrelated population controls (xx males, xx females). Early onset was defined for subjects having their MI before the age of 55 for males and 65 for females. Of the 1425 patients 345 were diagnosed with more than one atherosclerotic complication (including 157 with MI and stroke but without PAOD, 148 with MI and PAOD but without stroke, and 40 with all three diseases). The recruitment of the cohort has previously been described 2 In brief, MI patients were recruited from a registry that includes all MIs diagnosed before the age of 75 in Iceland from 1981-2002. Diagnosis of patients followed WHO-MONICA diagnostic criteria for acute MI in terms of elevations of cardiac enzymes and electrocardiographic changes 30. The stroke diagnosis was confirmed by neurologists after examining the patients and/or reviewing their medical and radiological records. The PAOD diagnosis was confirmed by angiography showing severe atherosclerosis, and the majority (85%) has undergone angioplasty and/or vascular surgery.

[0474] The Data Protection Commission of Iceland and the National Bioethics Committee of Iceland approved the study. Informed consent was obtained from all study participants. Personal identifiers associated with medical information and blood samples were encrypted with a third party encryption system as previously described ³¹.

### Subjects from the United States

Philadelphia

[0475] The patients and controls came from the same study cohort that was ascertained among individuals who underwent a coronary angiography in the cardiac catheterization laboratory of the University of Pennsylvania. Apart from history of MI, the diagnosis was confirmed by angiography. (Input from collaborators)

[0476] The patient group included 731 Caucasians, 103 African Americans, and 73 subjects of other or unknown ethnicity (including 4 Native Americans, 7 Hispanics, 9 of other (undefined) ethnicity and 51 of unknown ethnicity). The control group included 434 Caucasians, 128 African Americans, and 86 individuals of other or unknown ethnicity (including 5 Asians, 14 Hispanics, 11 of other (undefined) ethnicity, and 62 of unknown ethnicity).

Cleveland

[0477] The study group from Cleveland included 696 MI patients (553 males and 143 females) and 698 controls (314 males and 384 females). The majority of the study subjects were Caucasians and approximately 10% were African American. Information on the ethnicity of individuals was not available. To separate the study subjects into ethnic groups 8 microsatellite markers with different allele distributions in Caucasians and African Americans were genotyped on the study cohort. This procedure is described in detail elsewhere (submitted manuscript). In brief, the 8 markers were identified by genotyping approximately 2000 microsatellite markers in a group of 35 Caucasian Americans and 88 African Americans, with self-reported ethnicity, from many regions of the United States. The allelic frequencies of the microsatellite markers in this cohort were used as a reference when we evaluated the population stratification in the study cohort from Cleveland. Of the Caucasian MI patients 147 did also have a history of stroke and/or peripheral vascular disease.

[0478] The statistical analysis for the association study of the LTA4H gene haplotypes with MI is described above in Example 1.

### Association Study

[0479] In a case-control association study, including 1500 MI patients and 900 population-based controls, 10 genotyped SNPs were tested for association to the disease. The frequency of all SNPs in the patient and control groups is shown in Table 42. One SNP or SG12S100 (rs2247570) showed nominally significant association to MI (Table 43). The frequency of allele T of this SNP was 72.4% and 69.6% in the patient and control groups respectively (P=0.043), which corresponds to a 15% increase in risk of MI for each copy of allele T carried (Table 43).

TABLE 42
SNP allelic association to MI
Shown are the genotyped SNPs including public names if available (variation shown in brackets), and
the frequency of the underlined allele, in Caucasian, and African American cohorts, and in a cohort of
unknown or other ethnicity. Each column represents an individual cohort. The ethnicity of the cohort
is indicated, followed by a letter for the place from which the cohort came. The letters I identifies the
cohort from Iceland, the letter P identifies the cohort from Philadelphia and the letter C identifies the
cohorts from Cleveland. Also shown is the number (n) of subjects genotyped, the relative risk (RR)
and the P-value for the association with MI. The P-values are two sided and are obtained with a
likelihood ratio test. Public names for SNPs SG12S16 and SG12S26 are not available. The basepair
positions for these two SNPs in the human genome assembly build 34 (National Center for
Biotechnology Information (NCBI)) are 94896055 and 94916919, respectively

| | | | | Unknown | Afr. | Afr. |
|---|---|---|---|---|---|---|
| SNP name (variation) | Caucasian I | Caucasian P | Caucasian C | or other P | American P | American C |
| SG12S16 (T/C) | | | | | | |
| Frq. in patients (n) | 0.232 (1521) | 0.239 (547) | 0.255 (606) | 0.167 (60) | 0.044 (80) | 0.035 (57) |
| Frq. in controls (n) | 0.233 (807) | 0.239 (333) | 0.228 (576) | 0.143 (63) | 0.06 (100) | 0.045 (89) |
| RR/P-value | | | | | | |
| SG12S21/rs2660880 (A/G) | | | | | | |
| Frq. in patients (n) | 0.062 (1510) | 0.073 (704) | 0.066 (586) | 0.028 (72) | 0.021 (97) | 0.009 (55) |
| Frq. in controls (n) | 0.071 (829) | 0.062 (422) | 0.067 (568) | 0.055 (82) | 0.012 (124) | 0.006 (87) |
| RR/P-value | | | | | | |
| SG12S23/rs6538697 (T/C) | | | | | | |
| Frq. in patients (n) | 0.926 (1430) | 0.934 (715) | 0.915 (597) | 0.894 (71) | 0.842 (98) | 0.791 (55) |
| Frq. in controls (n) | 0.928 (822) | 0.911 (426) | 0.917 (569) | 0.907 (86) | 0.849 (126) | 0.858 (88) |
| RR/P-value | | | | | | |
| SG12S25/rs1978331 (A/G) | | | | | | |
| Frq. in patients (n) | 0.636 (1348) | 0.603 (718) | 0.582 (604) | 0.575 (73) | 0.38 (100) | 0.373 (55) |
| Frq. in controls (n) | 0.613 (815) | 0.599 (423) | 0.593 (577) | 0.559 (85) | 0.242 (126) | 0.273 (88) |
| RR/P-value | | | | | 1.92/0.0016 | 1.58/0.077 |
| SG12S26 (T/C) | | | | | | |
| Frq. in patients (n) | 0.831 (1442) | 0.831 (699) | 0.809 (606) | 0.854 (72) | 0.969 (96) | 0.973 (55) |
| Frq. in controls (n) | 0.827 (812) | 0.813 (417) | 0.828 (573) | 0.894 (85) | 0.955 (122) | 0.961 (89) |
| RR/P-value | | | | | | |
| SG12S100/rs2247570 | | | | | | |
| (T/C) | | | | | | |
| Frq. in patients (n) | 0.724 (1496) | 0.699 (690) | 0.688 (582) | 0.671 (70) | 0.626 (95) | 0.644 (52) |
| Frq. in controls (n) | 0.696 (805) | 0.708 (409) | 0.699 (568) | 0.69 (84) | 0.533 (123) | 0.518 (85) |
| RR/P-value | 1.15/0.043 | | | | 1.47/0.049 | 1.69/0.039 |
| SG12S28/rs2660898 (T/G) | | | | | | |
| Frq. in patients (n) | 0.695 (1375) | 0.686 (711) | 0.658 (603) | 0.711 (71) | 0.798 (99) | 0.741 (56) |
| Frq. in controls (n) | 0.678 (800) | 0.665 (426) | 0.674 (579) | 0.738 (84) | 0.798 (124) | 0.817 (90) |
| RR/P-value | | | | | | |
| SG12S143/rs2540482 | | | | | | |
| (C/T) | | | | | | |
| Frq. in patients (n) | 0.174 (1473) | 0.263 (716) | 0.247 (592) | 0.368 (72) | 0.285 (100) | 0.286 (56) |
| Frq. in controls (n) | 0.173 (833) | 0.207 (423) | 0.239 (562) | 0.271 (85) | 0.232 (125) | 0.256 (88) |
| RR/P-value | | 1.37/0.0025 | | 1.57/0.064 | | |
| SG12S144/rs2660845 | | | | | | |
| (G/A) | | | | | | |
| Frq. in patients (n) | 0.211 (1415) | 0.30 (697) | 0.293 (564) | 0.426 (68) | 0.337 (95) | 0.349 (53) |
| Frq. in controls (n) | 0.214 (807) | 0.251 (417) | 0.298 (552) | 0.298 (84) | 0.29 (124) | 0.355 (83) |
| RR/P-value | | 1.28/0.012 | | 1.75/0.02 | | |
| SG12S221/rs2540475 | | | | | | |
| (G/A) | | | | | | |
| Frq. in patients (n) | 0.821 (1438) | 0.778 (718) | 0.79 (603) | 0.856 (73) | 0.887 (97) | 0.902 (56) |
| Frq. in controls (n) | 0.821 (773) | 0.772 (428) | 0.8 (578) | 0.853 (85) | 0.861 (126) | 0.864 (88) |
| RR/P-value | | | | | | |

[0480] TABLE 43
SNP allelic association to MI

| | | | Frequency | | | # genotyped | | | |
|---|---|---|---|---|---|---|---|---|---|
| Cohort | SNPs | Allele | Patients | Controls | | Patients | Controls | RR | P |
| Iceland | | | | | | | | | |
| Caucasians | SG12S100 | T | 0.724 | 0.696 | # | 1496 | 805 | 1.15 | 0.043 |
| Philadelphia | | | | | | | | | |
| Caucasians | SG12S100 | T | 0.699 | 0.708 | # | 690 | 409 | 0.96 | NS |
| | SG12S143 | C | 0.263 | 0.206 | # | 716 | 424 | 1.37 | 0.002 |
| | SG12S144 | G | 0.30 | 0.25 | # | 697 | 418 | 1.28 | 0.011 |
| | SG12S23 | T | 0.934 | 0.91 | # | 715 | 427 | 1.39 | 0.04 |
| African | SG12S100 | T | 0.626 | 0.533 | # | 95 | 123 | 1.47 | 0.049 |
| Americans | SG12S143 | C | 0.285 | 0.232 | # | 100 | 125 | 1.32 | NS |
| | SG12S144 | G | 0.337 | 0.29 | # | 95 | 124 | 1.24 | NS |
| | SG12S23 | T | 0.842 | 0.849 | # | 98 | 126 | 0.95 | NS |
| | SG12S25 | A | 0.38 | 0.242 | # | 100 | 126 | 1.92 | 0.002 |
| Undefined | SG12S100 | T | 0.671 | 0.69 | # | 70 | 84 | 0.92 | NS |
| ethnicity | SG12S143 | C | 0.368 | 0.262 | # | 72 | 103 | 1.64 | 0.035 |
| | SG12S144 | G | 0.426 | 0.291 | # | 68 | 103 | 1.8 | 0.01 |
| | SG12S23 | T | 0.894 | 0.907 | # | 71 | 86 | 0.87 | NS |
| | SG12S25 | A | 0.575 | 0.559 | # | 73 | 85 | 1.07 | NS |
| Cleveland | | | | | | | | | |
| Caucasians | SG12S100 | T | 0.688 | 0.699 | # | 582 | 568 | 0.95 | NS |
| | SG12S143 | C | 0.247 | 0.239 | # | 592 | 562 | 1.05 | NS |
| | SG12S144 | G | 0.293 | 0.298 | # | 564 | 552 | 0.98 | NS |
| | SG12S23 | T | 0.915 | 0.917 | # | 597 | 569 | 0.99 | NS |
| | SG12S25 | A | 0.582 | 0.593 | # | 604 | 577 | 0.96 | NS |
| African | SG12S100 | T | 0.644 | 0.518 | # | 52 | 85 | 1.69 | 0.039 |
| Americans | SG12S143 | C | 0.292 | 0.246 | # | 53 | 81 | 1.26 | NS |
| | SG12S144 | G | 0.349 | 0.355 | # | 53 | 83 | 0.97 | NS |
| | SG12S23 | T | 0.791 | 0.858 | # | 55 | 88 | 0.63 | NS |
| | SG12S25 | A | 0.373 | 0.273 | # | 55 | 88 | 1.58 | 0.077 |

[0481] All haplotypes defined by the genotyped SNPs were tested for association to MI. As shown in Table 44 no haplotype is significantly over-represented in all MI patients. Since males with MI showed suggestive linkage to the chromosome 12q22-23 region, this phenotype was also tested for association. In addition we tested haplotype association to more severe MI phenotypes, or early onset MI, and MI with another clinical manifestation of atherosclerosis (PAOD and/or stroke). The phenotypes MI in males or early onset disease did not show significant association to any of the tested haplotypes. However, as shown in Table 45, MI with additional atherosclerotic manifestation showed an association to a haplotype that we call HapK. The allelic frequency of HapK in patients with additional atherosclerotic manifestation and in controls is 14.5% and 10.4%, respectively, which corresponds to a relative risk (RR) of 1.45 (P=0.0091), for each copy of HapK carried.

[0482] Since proper interpretation of the significance of the association of the SNP SG12S100 and haplotype HapK to MI has to take multiple comparisons into account, the P-values were adjusted for the number of tests made, corresponding to the number of haplotypes tested, by randomizing the patients and controls. The significance of the association of SNP SG12S100 to MI did not survive this adjustment at 0.05 level. However, the association of HapK to MI with additional atherosclerotic complication could still be considered significant with adjusted P-value 0.035. However, since the adjusted P-value still does not take the multiple phenotypes tested into account we consider this haplotype only marginally significant with the Icelandic data only. Hence, this candidate at-risk variant called for confirmation in an independent cohort.

TABLES 44
Shown are all observed haplotypes with frequency greater than 1% in the population
controls for each indicated cohort, and the allelic frequency
in patients and controls. Also shown is the relative risk (RR)
and the P-value for the association to MI.
44a. Iceland-Caucasians (1555patients/863controls)Patients = All MI

| SG12S16 | SG12S21 | SG12S23 | SG12S25 | SG12S26 | SG12S100 | SG12S28 |
|---|---|---|---|---|---|---|
| C | G | T | A | T | T | T |
| C | G | T | A | T | T | T |
| T | G | T | G | C | C | G |
| C | G | C | G | T | T | G |
| T | G | T | G | C | C | G |
| T | A | T | G | T | C | G |
| C | G | T | G | T | C | T |
| T | G | T | G | C | C | G |
| C | G | T | A | T | T | T |
| C | G | T | G | T | C | T |
| C | A | T | G | T | C | G |
| C | G | C | G | T | T | G |

| | | | | | Frequency | | |
|---|---|---|---|---|---|---|---|
| SG12S143 | SG12S144 | SG12S221 | P | RR | Patients | Controls | Name |
| T | A | G | 2.7E−01 | 1.07 | 0.497 | 0.480 | HapL |
| C | G | G | 3.8E−01 | 1.09 | 0.112 | 0.104 | HapK |
| T | A | A | 2.3E−01 | 1.15 | 0.090 | 0.079 | |
| T | A | G | 5.8E−01 | 1.07 | 0.064 | 0.060 | |
| C | G | G | 9.2E−01 | 0.99 | 0.058 | 0.059 | |
| T | A | A | 4.7E−01 | 0.90 | 0.048 | 0.053 | |
| T | G | G | 2.9E−02 | 0.70 | 0.031 | 0.044 | |
| T | A | G | 1.0E−01 | 0.71 | 0.022 | 0.031 | |
| T | A | A | 7.4E−01 | 0.92 | 0.018 | 0.019 | |
| T | A | G | 1.1E−01 | 0.61 | 0.008 | 0.013 | HapQ |
| T | A | A | 9.1E−02 | 0.57 | 0.006 | 0.011 | |
| T | A | A | 7.0E−01 | 1.13 | 0.012 | 0.011 | |

44b. Iceland-Caucasians (325patients/863controls) Patients = MI with additional CVD

| SG12S16 | SG12S21 | SG12S23 | SG12S25 | SG12S26 | SG12S100 | SG12S28 |
|---|---|---|---|---|---|---|
| C | G | T | A | T | T | T |
| C | G | T | A | T | T | T |
| T | G | T | G | C | C | G |
| C | G | C | G | T | T | G |
| T | G | T | G | C | C | G |
| T | A | T | G | T | C | G |
| C | G | T | G | T | C | T |
| T | G | T | G | C | C | G |
| C | G | T | A | T | T | T |
| C | G | T | G | T | C | T |
| C | A | T | G | T | C | G |
| C | G | C | G | T | T | G |

| | | | | | Frequency | | |
|---|---|---|---|---|---|---|---|
| SG12S143 | SG12S144 | SG12S221 | P | RR | Patients | Controls | Nameo |
| T | A | G | 8.7E−01 | 0.98 | 0.477 | 0.480 | HapL |
| C | G | G | 9.1E−03 | 1.45 | 0.145 | 0.104 | HapK |
| T | A | A | 5.5E−01 | 1.11 | 0.086 | 0.079 | |
| T | A | G | 8.6E−01 | 0.97 | 0.058 | 0.060 | |
| C | G | G | 5.4E−01 | 0.88 | 0.051 | 0.059 | |
| T | A | A | 8.9E−01 | 0.97 | 0.051 | 0.053 | |
| T | G | G | 8.8E−03 | 0.48 | 0.021 | 0.044 | |
| T | A | G | 9.6E−01 | 0.99 | 0.032 | 0.031 | |
| T | A | A | 1.4E−01 | 0.51 | 0.010 | 0.019 | |
| T | A | G | 4.1E−01 | 0.67 | 0.009 | 0.013 | HapQ |
| T | A | A | 2.6E−01 | 0.54 | 0.006 | 0.011 | |
| T | A | A | 9.5E−01 | 0.97 | 0.011 | 0.011 | |

44c. Philadelphia-Caucasians (731 patients/434controls)

| SG12S16 | SG12S21 | SG12S23 | SG12S25 | SG12S26 | SG12S100 | SG12S28 |
|---|---|---|---|---|---|---|
| C | G | T | A | T | T | T |
| C | G | T | A | T | T | T |
| T | G | T | G | C | C | G |
| C | G | C | G | T | T | G |
| T | G | T | G | C | C | G |
| T | A | T | G | T | C | G |
| C | G | T | A | T | T | T |
| C | G | C | G | T | T | G |
| C | G | T | G | T | C | T |
| T | G | T | G | C | C | G |
| C | G | T | G | T | C | T |
| C | G | T | G | T | T | T |
| C | G | T | G | T | T | T |

| | | | | | Frequency | | |
|---|---|---|---|---|---|---|---|
| SG12S143 | SG12S144 | SG12S221 | P | RR | Patients | Controls | Name |
| T | A | G | 4.5E−02 | 0.83 | 0.363 | 0.406 | HapL |
| C | G | G | 1.5E−02 | 1.34 | 0.185 | 0.145 | HapK |
| T | A | A | 3.7E−01 | 0.88 | 0.098 | 0.110 | |
| T | A | G | 8.9E−02 | 0.72 | 0.048 | 0.065 | |
| C | G | G | 7.5E−01 | 0.94 | 0.048 | 0.051 | |
| T | A | A | 3.3E−01 | 1.21 | 0.060 | 0.050 | |
| T | A | A | 5.9E−01 | 1.17 | 0.030 | 0.026 | |
| T | A | A | 1.3E−01 | 0.59 | 0.013 | 0.022 | |
| T | G | G | 7.6E−01 | 1.10 | 0.023 | 0.021 | |
| T | A | G | 8.8E−01 | 0.94 | 0.018 | 0.019 | |
| T | A | G | 8.3E−02 | 1.75 | 0.027 | 0.016 | HapQ |
| T | A | G | 1.2E−01 | 0.47 | 0.007 | 0.014 | |
| T | G | G | 3.7E−01 | 1.41 | 0.017 | 0.012 | |

44d. Cleveland-Caucasians (614patients/583controls)

| SG12S16 | SG12S21 | SG12S23 | SG12S25 | SG12S26 | SG12S100 | SG12S28 |
|---|---|---|---|---|---|---|
| C | G | T | A | T | T | T |
| C | G | T | A | T | T | T |
| T | G | T | G | C | C | G |
| C | G | C | G | T | T | G |
| T | G | T | G | C | C | G |
| T | A | T | G | T | C | G |
| C | G | T | G | T | C | T |
| C | G | T | G | T | C | T |
| C | G | T | A | T | T | T |
| C | G | C | G | T | T | G |
| T | G | T | G | C | C | G |
| C | G | T | G | T | T | T |
| C | G | T | A | T | T | T |

| | | | | | Frequency | | |
|---|---|---|---|---|---|---|---|
| SG12S143 | SG12S144 | SG12S221 | P | RR | Patients | Controls | Name |
| T | A | G | 7.4E−01 | 0.97 | 0.380 | 0.386 | HapL |
| C | G | G | 8.8E−01 | 1.02 | 0.163 | 0.160 | HapK |
| T | A | A | 4.2E−01 | 1.12 | 0.100 | 0.091 | |
| T | A | G | 7.9E−01 | 1.05 | 0.064 | 0.061 | |
| C | G | G | 8.7E−01 | 0.97 | 0.057 | 0.058 | |
| T | A | A | 7.8E−01 | 1.05 | 0.053 | 0.050 | |
| T | G | G | 6.7E−01 | 0.90 | 0.030 | 0.033 | |
| T | A | G | 9.8E−01 | 1.01 | 0.023 | 0.023 | HapQ |
| T | A | A | 9.1E−01 | 0.97 | 0.021 | 0.022 | |
| T | A | A | 6.7E−01 | 0.86 | 0.016 | 0.019 | |
| T | A | G | 6.5E−01 | 1.17 | 0.021 | 0.018 | |
| T | G | G | 8.2E−01 | 0.92 | 0.013 | 0.014 | |
| C | A | G | 3.9E−01 | 0.64 | 0.007 | 0.010 | |

44e. Philadelphia-Other or unknown ethnicity (73patients/86controls)

| SG12S16 | SG12S21 | SG12S23 | SG12S25 | SG12S26 | SG12S100 | SG12S28 |
|---|---|---|---|---|---|---|
| C | G | T | A | T | T | T |
| C | G | T | A | T | T | T |
| C | G | T | G | T | C | T |
| T | A | T | G | T | C | G |
| T | G | T | G | C | C | G |
| C | G | C | G | T | T | G |
| C | G | T | G | T | T | T |
| C | G | T | G | T | C | T |
| T | G | T | G | C | C | G |
| C | G | C | G | T | C | G |
| T | G | T | G | C | C | G |
| C | G | C | G | T | T | G |
| C | G | T | G | T | T | T |
| T | G | T | G | T | T | T |
| T | G | T | G | C | C | G |

| | | | | | Frequency | | |
|---|---|---|---|---|---|---|---|
| SG12S143 | SG12S144 | SG12S221 | P | RR | Patients | Controls | Name |
| T | A | G | 7.7E−02 | 0.64 | 0.274 | 0.370 | HapL |
| C | G | G | 1.1E−02 | 2.04 | 0.283 | 0.162 | HapK |
| T | A | G | 3.2E−01 | 0.59 | 0.045 | 0.074 | HapQ |
| T | A | A | 2.5E−01 | 0.51 | 0.027 | 0.052 | |
| T | A | A | 6.7E−01 | 1.24 | 0.059 | 0.048 | |
| T | A | G | 9.0E−01 | 0.93 | 0.041 | 0.044 | |
| T | A | G | 5.7E−01 | 0.69 | 0.027 | 0.039 | |
| T | G | G | 1.8E−01 | 2.22 | 0.058 | 0.027 | |
| T | A | G | 8.7E−01 | 0.84 | 0.021 | 0.025 | |
| C | G | G | 9.4E−01 | 0.94 | 0.020 | 0.021 | |
| C | G | G | 5.7E−02 | 3.88 | 0.063 | 0.017 | |
| T | A | A | 1.8E−01 | 2.65 | 0.041 | 0.016 | |
| T | G | G | 9.1E−02 | 0.00 | 0.000 | 0.014 | |
| C | G | G | 1.2E−01 | 0.00 | 0.000 | 0.012 | |
| C | G | A | 2.6E−01 | 0.00 | 0.000 | 0.010 | |

42f. Philadelphia-African Americans (103patients/128controls)

| SG12S16 | SG12S21 | SG12S23 | SG12S25 | SG12S26 | SG12S100 | SG12S28 |
|---|---|---|---|---|---|---|
| C | G | T | G | T | C | T |
| C | G | T | G | T | T | T |
| C | G | T | A | T | T | T |
| C | G | C | G | T | T | G |
| C | G | T | G | T | C | T |
| C | G | T | G | T | C | T |
| C | G | C | G | T | C | G |
| C | G | T | A | T | C | T |
| C | G | T | G | T | C | T |
| C | G | C | G | T | C | G |
| C | G | C | G | T | T | G |
| C | G | T | A | T | T | T |
| C | G | T | A | T | T | T |
| C | G | T | G | T | T | T |
| T | G | T | G | C | C | G |
| C | G | T | A | T | T | T |
| T | G | T | G | C | C | G |
| C | G | T | G | T | T | T |
| T | G | T | G | C | C | G |

| | | | | | Frequency | | |
|---|---|---|---|---|---|---|---|
| SG12S143 | SG12S144 | SG12S221 | P | RR | Patients | Controls | Name |
| T | A | G | 3.4E−02 | 0.53 | 0.119 | 0.202 | HapQ |
| T | A | G | 4.8E−02 | 0.55 | 0.110 | 0.183 | |
| T | A | G | 2.5E−02 | 1.77 | 0.235 | 0.148 | HapL |
| T | A | G | 4.7E−01 | 1.38 | 0.073 | 0.054 | |
| T | G | G | 4.8E−01 | 1.34 | 0.070 | 0.054 | |
| C | G | G | 1.9E−01 | 0.29 | 0.013 | 0.042 | |
| C | G | G | 5.3E−01 | 0.65 | 0.026 | 0.039 | |
| C | G | A | 5.4E−01 | 0.70 | 0.026 | 0.036 | |
| T | A | A | 6.1E−02 | 0.18 | 0.006 | 0.033 | |
| T | A | G | 3.6E−01 | 0.48 | 0.014 | 0.029 | |
| C | G | G | 3.9E−01 | 0.48 | 0.014 | 0.029 | |
| T | A | A | 9.0E−01 | 0.90 | 0.020 | 0.022 | |
| C | G | G | 4.9E−04 | 5.48 | 0.105 | 0.021 | HapK |
| C | G | G | 5.9E−01 | 1.46 | 0.028 | 0.019 | |
| T | A | G | 7.0E−01 | 0.70 | 0.012 | 0.012 | |
| C | G | A | 7.6E−01 | 1.42 | 0.018 | 0.018 | |
| C | G | G | 7.7E−01 | 0.74 | 0.009 | 0.009 | |
| T | G | G | 3.0E−01 | 0.00 | 0.000 | 0.000 | |
| T | A | A | 5.1E−01 | 0.17 | 0.002 | 0.002 | |

42g. Cleveland-African Americans (57patients/90controls)

| SG12S16 | SG12S21 | SG12S23 | SG12S25 | SG12S26 | SG12S100 | SG12S28 |
|---|---|---|---|---|---|---|
| C | G | T | G | T | C | T |
| C | G | T | A | T | T | T |
| C | G | T | G | T | T | T |
| C | G | T | G | T | C | T |
| C | G | T | G | T | T | T |
| C | G | T | A | T | T | T |
| C | G | C | G | T | T | G |
| C | G | C | G | T | C | G |
| C | G | T | G | T | C | T |
| C | G | T | A | T | T | T |
| T | G | T | G | C | C | G |
| C | G | T | G | T | T | T |
| C | G | C | G | T | C | G |
| C | G | T | A | T | C | T |
| C | G | T | A | T | T | T |
| C | G | T | G | T | C | T |

| | | | | | Frequency | | |
|---|---|---|---|---|---|---|---|
| SG12S143 | SG12S144 | SG12S221 | P | RR | Patients | Controls | Name |
| T | A | G | 7.3E−02 | 0.51 | 0.116 | 0.206 | HapQ |
| T | A | G | 2.5E−01 | 1.51 | 0.196 | 0.140 | HapL |
| T | A | G | 8.3E−01 | 0.91 | 0.096 | 0.105 | |
| T | G | G | 5.6E−02 | 0.33 | 0.031 | 0.087 | |
| C | G | G | 4.4E−01 | 0.58 | 0.038 | 0.064 | |
| C | G | G | 2.1E−02 | 2.89 | 0.153 | 0.059 | HapK |
| T | A | G | 1.9E−01 | 1.97 | 0.101 | 0.054 | |
| T | A | G | 2.6E−01 | 1.92 | 0.083 | 0.045 | |
| C | G | G | 8.8E−01 | 0.88 | 0.037 | 0.041 | |
| C | G | A | 2.1E−02 | 0.00 | 0.000 | 0.041 | |
| T | A | A | 4.0E−01 | 0.52 | 0.018 | 0.033 | |
| T | A | A | 1.5E−01 | 0.00 | 0.000 | 0.014 | |
| C | G | G | 4.9E−01 | 2.02 | 0.029 | 0.014 | |
| C | G | A | 1.9E−01 | 0.00 | 0.000 | 0.013 | |
| T | A | A | 5.1E−01 | 2.35 | 0.023 | 0.010 | |
| T | A | A | 3.9E−01 | 3.26 | 0.031 | 0.010 | |

[0483] TABLE 45
The association of HapK to MI

| | Frequency | | | |
|---|---|---|---|---|
| Cohorts (n) | Patients | Controls | RR | P-value |
| Iceland | | | | |
| Caucasians, all MI | 0.112 | 0.104 | 1.09 | NS |
| (1555/863) | | | | |
| Early onset (725/863) | 0.114 | 0.104 | 1.10 | NS |
| MI and additional CVD | 0.145 | 0.104 | 1.45 | 0.0091 |
| (325/863) | | | | |
| Philadelphia | | | | |
| Caucasians, all MI | 0.185 | 0.145 | 1.34 | 0.015 |
| (731/434) | | | | |
| African Americans, all | 0.105 | 0.021 | 5.28 | 0.00049 |
| MI (103/128) | | | | |
| Other or undefined | 0.283 | 0.162 | 2.04 | 0.011 |
| ethnicity, all MI (73/86) | | | | |
| Cleveland | | | | |
| Caucasians, all MI | 0.163 | 0.160 | 1.02 | NS |
| (614/583) | | | | |
| MI and additional CVD | 0.183 | 0.160 | 1.20 | NS |
| (147/601) | | | | |
| African Americans, all | 0.153 | 0.059 | 2.89 | 0.021 |
| MI (57/90) | | | | |

### EXAMPLE 18

### A Replication Study of SNPs in LTA4H Gene in US Cohorts

[0484] In a replication study, the putative association of HapK to MI was assessed in independent study cohorts from Philadelphia and Cleveland. The cohort from Philadelphia included 901 subjects who had suffered a MI and 738 controls, who had undergone coronary angiography and had no evidence of coronary artery disease. The ethnicity of the individuals from Philadelphia was self-reported. The cohort from Cleveland included 696 MI patients and 698 controls.

[0485] The 10 SNPs, genotyped in the Icelandic cohort, were typed in the US cohorts and in addition to testing haplotype association, association to single SNPs in each ethnic group was tested separately. Table 42 (above) shows the frequency of all genotyped SNPs in the US and Icelandic cohorts. The frequency of the SNPs is quite similar in the three Caucasian groups on one hand and in the two African American cohorts on the other hand. However, as expected the frequency of many of the SNPs differs between the two ethnic groups. As shown in Table 43 (above)the nominally significant association of SNP SG12S100 to MI in the Icelandic cohort does not hold up in the US Caucasians. However, the association of this SNP to MI is replicated in both African American groups. The frequency of allele T is 62.6% and 53.3% in African American patients and controls from Philadelphia respectively (P=0.049), which corresponds to a RR of 1.47 for each T allele. The corresponding frequency in African Americans from Cleveland is 64.4% and 51.8% (P=0.039) and the RR of MI for carriers of each T allele is 1.69.

[0486] Furthermore, another SNP, or SG12S25 (rs1978331), associates with MI in African Americans from Philadelphia; the frequency of allele A is 38.0% and 24.2% in patients and controls respectively (P=0.0016). Similar frequencies of this SNP were observed in the African American cohort from Cleveland, or 37.3% and 27.3% in patients and controls respectively (P-value 0.077). As shown in Table 42 (above), three SNPs, SG12S143 (rs2540482), SG12S144 (rs2660845), and SG12S23 (rs6538697) show single marker association to MI in Caucasians from Philadelphia, with respective P-values 0.0023, 0.011 and 0.04. The association of SG12S144 to MI was replicated in the cohort from Philadelphia that included subjects of other or unknown ethnicity, with P-value 0.02. Furthermore, we observed that the at-risk allele (C) of SG12S 143 is over-represented in the patients of unknown or other ethnicity and in both African American cohorts, and the at-risk allele (G) of SG12S144 in African Americans from Philadelphia, although the association was not significant in these cohorts. No significant association between SNPs and MI was observed in Caucasians from Cleveland (Table 43). However, we observed that allele C of SG12S143 is over-represented in the subgroup of MI patients that also had history of other atherosclerotic manifestations, including stroke or peripheral vascular disease; the frequency in this patient group is 29.2% compared to a 23.9% frequency in the control group (P=0.06). In addition, the frequency of allele G of SG12S144 in MI patients with additional atherosclerotic manifestations is 34.8% compared to a 29.8% frequency in the control group (P=0.09).

[0487] Table 44 (above) shows the frequency of all observed haplotypes in the US and Icelandic cohorts. In addition, LD maps for US Caucasians and African Americans are shown in a Table 42.

[0488] Table 45 shows haplotype association results for the Icelandic at-risk haplotype HapK in the US cohorts. As shown in Table 45, although the haplotype frequency of HapK differs substantially between the ethnic groups, HapK associates with MI in all groups except in Caucasians from Cleveland. The haplotype frequency of HapK in the Caucasian patient and control groups from Philadelphia is 18.5% and 14.5%, respectively (P=0.015), which corresponds to a 1.34 RR of MI for each copy of HapK carried. While the haplotype frequency of HapK was less in patients and controls of African American origin from Philadelphia, or 10.5% versus 2.1% respectively, the RR of MI for carriers of HapK in this cohort is more than 5 (P=0.00049) (Table 45). The haplotype frequency of HapK in the subjects from Philadelphia with other or unknown ethnicity, was 28.3% and 16.2% in the patients and controls respectively (P=0.011), which corresponds to a 2-fold increase in risk of MI for each copy of HapK carried. Furthermore, HapK significantly associated with MI in the small African American cohort from Cleveland, conferring almost 3-fold increase in risk of MI for each copy of HapK carried (P=0.021). Association of HapK to MI in the Caucasian cohort from Cleveland was not observed (Table 45). However, we observed that the frequency of HapK in the subgroup of MI patients that also had history of other atherosclerotic manifestations is greater than in the total MI group (Table 45).

### Haplotype Diversity and Association in African Americans

[0489] The haplotype diversity in the LTA4H region in the African American cohorts is quite different from that in the Caucasian cohorts (Table 44). For example, the allelic frequency of the most common haplotype (HapL) in Caucasians is ˜40% and 48% in the US and Icelandic cohorts respectively. In contrast, the frequency of HapL in the African American controls is only 14-15%. In addition, the allelic frequency of the most common haplotype in African Americans, that we call HapQ, is 20%, but the frequency of HapQ in the Caucasian cohorts is ten times less. The haplotype diversity in the cohort including individuals of other or unknown ethnicity appears to be much closer to the diversity in Caucasians (Table 44).

[0490] Given the distinct haplotype diversity of African Americans, additional haplotypes for association to MI in this ethnic group were tested. Table 46 shows two haplotypes that in addition to HapK show association to MI in the African American cohorts. As shown in Table 46, the allelic frequency of HapL in African Americans from Philadelphia is 23.5% and 14.8% in patients and controls respectively (P=0.025) which corresponds to a RR of 1.77. Similar frequency of HapL was observed in the African American cohort from Cleveland or 19.6% and 14.0% in patients and controls respectively, with RR 1.51, but the sample size is small and the P-value was not significant in this cohort.

[0491] Furthermore we found a nominally significant association of HapQ, the most common haplotype in our African American cohorts, to MI. As shown in Table 46, the frequency of HapQ in the African Americans from Philadelphia was less in the patients than in controls, or 11.9% and 20.2% respectively (P=0.034). We further observed that the frequency of HapQ in the African American cohort from Cleveland was again similar to that in Philadelphia, or 11.6% and 20.6% in patients and controls respectively.

[0492] We repeated the association tests for HapL and HapQ in the African American cohorts from Philadelphia and Cleveland combined. In this combined group the RR of MI for HapL was 1.62 with P=0.019 and for HapQ the RR was 0.51 and P=0.0047 (Table 46).

[0493] In apparent contrast, the frequency of HapL in Caucasians from Philadelphia, is less in patients than in controls, or 36.3% and 40.6% respectively (P=0.045) (Table 44). Significant under-representation of HapL in patients is not observed in any other cohorts tested. HapQ, which is relatively rare (˜1-2% allelic frequency) in the Caucasian cohorts, did not show significant association to MI in these ethnic groups (Table 44).

TABLE 46
Haplotypes associated with MI in African Americans

| | | Frequency | | | |
|---|---|---|---|---|---|
| Cohorts (n) | Haplotype | Patients | Controls | RR | P |
| Philadelphia | | | | | |
| African Americans | HapL | 0.235 | 0.148 | 1.77 | 0.025 |
| (103/128) | HapQ | 0.119 | 0.202 | 0.53 | 0.034 |
| Cleveland | | | | | |
| African Americans | HapL | 0.196 | 0.14 | 1.51 | NS |
| (57/90) | HapQ | 0.116 | 0.206 | 0.51 | NS |
| African American | HapL | | | 1.62 | 0.019 |
| cohorts combined | HapQ | | | 0.51 | 0.0047 |
| (160/213) | | | | | |

### EXAMPLE 19

### Correlation Between LTB4 Production and HapK

[0494] To determine whether the MI-associated haplotype HapK correlates with LTB4 production we measured LTB4 from peripheral blood neutrophils isolated from 41 patients with a previous history of MI and 35 controls, whose medical history was unknown. A study including the same sample set, which showed that stimulated neutrophils from patients with a past history of MI produced more LTB4 than those of controls, is described above. To obtain the HapK-carrier status of these individuals, the SNPs defining HapK on DNA samples from the same subjects were genotyped. Seven patients and seven controls carried HapK. The ionomycin stimulated cells from individuals (both patients and controls) carrying the MI-associated haplotype, HapK, produced significantly more LTB4 than those from non-carriers. The P-values for the correlation with HapK are 0.01 and 0.008 for the LTB4 production after stimulation for 15 and 30 minutes respectively. Age and gender of the individuals does not correlate with the LTB4 production.

The application's sequence listing, which the Patent Office published only in electronic form, follows.

SEQUENCE LISTING (726 sequences)

SEQ ID NO: 1 - DNA, 214000 bp, Homo sapiens
gactaagatgaatatgcattcattcaccaaaatctcatattcccaaaaagcaggaaaggtagtacagtgagatggatgatgccttcacatgactcagatgtcacgtgtttctcaccattgagacccccaaggcaccccctcccagcatttaccagaatgtgtgtgtaactatttacagtgatttgtgtaattatttgattgtttctcttgtatcctgtagcaatgagggtagagattatatcccacctaccactgcagctccaggatccagcttcacaaacatttgttgaatgaatgaataagaaaagaggacacccccaaagaggctgcaagggaaaaagctacaaagacagaagcaccaggaaaaagtagggtcatgtaagtcaaagcaggaaaaaagttccatggtggggtggtcagcagtgtctaatgccacgaaggcacaaagtaggataaaggttaaaaatcagcctttggttttggcaaatatgaagcttatcggtagccttagcgagaacaattccatcagggagcagaagctaactgcagtgggttgagtcatcaagcaggcataaggaagtagggataccccattataagctactctttcaagaagctcaaatctgaaggttaggagaattaggtcagtagctagaaggaaatgtggagtcgaggggctgtttttcctcccaaggagtataaaggtgtaacgttgcatgaaaccacttcagacaaaggccgatatcaatagagaagttaaaacgcacgcctcaagatttgggaaggcttggggttgggcttaaagaggtaggagcatatttcctatcctaggacagagaataaagaagaaaggataggttcccatggagataaatttctaagtgttaaagaagaggctcagaaaattctagcatgataggctcacttttttctttttccatgaaggagatggcaaagtcaactgacatgagaaaggtgacaatactgatgggttgaagagcgatggacatttgaaataacttcttagaccagtagaggctggagttcataaatcagaactggctacaggttatatatgtttttttttttttctccaacagcataagataacagagcgaagtctgtagaaatgaaagaagagtcagatgaggatagctggagctagtgcaaggagggaagcaccacggtgggagccaggtaccccctggatttataattcatactgaattccaacaacagaagggctctaagcaggagagtgacagatttcagaagactgagacacatttggtaaaaaaaagtaggaggaaaacctgattctggaattagggcagccaatagacggcagtattttcagaaaggagggaatggtcaacagtgactttctagtctggagctcaggaggaagaggcaactctacctgatggtattaagatcatggaggtagctgagatcacctagcttgtgtgtgtcaaatgagaaaagaagaaagaataggagaagttccccaggaacacagacattaagtggggctgtggtgacaacacaagaagagaggcttgcaaaggagcctgagcagctgtcatgagagaggtaggatggtggactcggagaagaggcagaagatgttcttaaaggaaggacactgctgccaagtagtcagccaattggtgacaaagaaagaccctgttgcgagaaaaaaagtcagtgaagtagtaggaacgatgacagatgacactgggttgaagactgaggagagagaagtgtaagagtggaagcagagggcagaccactcttctgagacactgaagaggcatagttagaaataaaggggagtcgccagaaaggaatttgtggctaagcaagaggttttctttaagactgaaatacataagcatgatttaaatgctgctgggatggagttcacagacctggaagacagaagacaaagcggatcatcaagatagtggaatttactgaaatgagagaggaaaatcccatccacaggaaatgcagacatgagggaggggccagaaggacagtgaaaacatcagcaactggtcccccaacttctgagtgaatgtggagatataatcaggtaaaggactgcatcatctccctggttaatgatggagtcagagaaaagagtgtcttatacagaagttgtgatatacttggccgggcgcagtggctcacgcctgtaatctaagcactttgggaggccaaggcaggcggatcacctgaggtcaggagttcatgactggcctggtcaacatggcaaaatcccacctctactaaaaacaaaagcctgtaatcccagctactagggaggctgaggcaggagaatcgcttgaacccaggaggcagaggttgcagtgagccaaggtcgcaccactgtactccagcctgggcaacagagctagactcagtctcaaaaaaaaaaaaaaaagatgtatttattctcactgtataaatttctgtgtaagaaatactctctcatatagaagtaaatttatatataaaattatatagaaccactataaaatactcaggtttataaaatttatatataaacttgttgacatataaaattccatgtaaatgactataaagtactcttatatgaaaagtatatgaattaaattatatatcaacttacttttatattacagtatttttgttatacagaagtttatatagtgacaataaatatttctcaagaacgatttcacataatagaagtataaattatccatttccaatagtgaaaaagaaaagcagttccacaccagtgacagggctacgaatctaagaggtacaaagacttcattcttagagacactgaggtcagggcatggccaacacatctgaagctgatagaattggcgctgggttggttggagacggtacggtattactattacaatggcagacgcttggccttgataactagccaatcagggggaaagattctggtttcctctgttattatctgaactagtgtgttcccaaagggttaagatggtttatggaaggcacaagatcagcaaaccataaaggattagcactaagaaggaaggaagtagaccaagtgttaatggcgatgccatgtaagagccaggtctgcgatgtatgttctacatggtttggggggtaaaaaaaatgtcagcctccagagcacagggctttaagcctcaagtactgttaacagtagagtttactagtctacagcaggaattacaaccagtaattctaaggccaattactcaggcaagttttactagaacaaggaagctctgcttcgaggtcaaatcgatttctgcatttatagaagcatctagatgttctctgttcaaacaatggggtaaaatccccacacattttatttctgacagagtgttccctatattgcctggccaggagtgataacattgcttggctattattaataaaacattgctgtggctgggcgcagtggctcacacctgtaatcctggcactttgggaggctgaggcaggaggatcacttaactccaggagtttgacagcagcctgggcaacatagcaagatcccatctctctaaaaaattttaaaattagctgggtgtggtggcagacacctgtagtcccagctcctcaggaagctgaggtgggaggatcacttgagcccaagcaggttgaggctgcagcgtgctgtgactgtgccactgcactccagcctgcgcaacacactgagagagactctgtctcaaaaaaatacatcaaataaaaattaaaagcccatttctttcttttggtacattacagccatgcacttcaaaggctagcacaattatttttctgcagttctatatttagattctagttagaagtaacctaggaccttcatgttagaggtgtctttggcaaaactgttatgtgagtgaaacgtttaatcaattgaggataaagatgcctcattgctaatgaagatgtggtttaaggattttatgcacccagttcatttattaacaacttgtttaagctttattagctgggtctctactttataactgtgttctttaatttacaagacaataaaaattaaaatggtaaatgggaaacctatcttgcttttcaataaataatttattttaataacttcgtgggcatggtggccaaaacattttagctgtgaaaataatttcaattcatatttttttggaatcaatattaaaaggtgatatattctcaaatgaaaagtggacaaatgatcagttataggacatgattaagaaactaaccatgagccacgtgcagtggctcatgcctgtaatcccagcactctgggaggccgcggtgagcggattgcttgagcccaggagttcaagaccaggctgggcaacatggcaaaaacccggctctactaaaaatgcaaaaaaaaaaaaaaaaaaaaaaatttagctgggttttggtggcttatgcctgcagtcccagctactcgggaggctgactcgggaggctgaggcacaagaatcatttgaacccaggaggcagaggttgcaatgagctgagaatacaccactgcactccagcctgggcaacagagagagagagactcagtctcaaaaaacaaacaaacaaacaaacaaaccgctgccctgtgcttggagagatctgtttacctttaccactaaagactgttggaagtaaattttagaaggtttataatacctaaaagtaatcacttctgtcttatgaaaggttctgctgagatttttctattgtggccactagtggcaatattccagaagtcatatttaaagaatatctttagtggattcagcagtttttcaaatatgtacttttatctctccaacattcatgattgcaatttttcaaattaacctcatgatataaacaactgtactctatgatgcctcatagtacagaaactggaggcagaaagagaagttgaatgtctaagaatcggtaattctaaaactcaacatagaccattcagcattagtggttctaacaatcccactgcaaaatgagttgataatgtgtaacactttagtgaactaaagcataaagaaccatggtctcctaatgcagcaaattaaaacacatgatagctacaattaatgaagtacatagtcctggctgggcactatggtacgtcctttacatagattatctcttaaattattaaccccgttttagagatgagaacattcgggctcaggaaggttatgtaagttatataaaaatcacaaaataagagacagagctaagatttgaatccaagtgtgaccaggttcatatcaagcttccatttttgaatttatattagaggtcaataactcacctttgtccttttaaaataatttttggctctgtgacctacacaggcaagctgttatttacaaacaacccacacatctagatggtcactgtctcaccgcccacttttaccatcaggactcctagtgagctgtcaaggggaatgctataattttggaggttctaaatctgagggcttaagaaagaaagaaattgtaaaaagcaggcattactcaggggcatagattgtcaggcagatctgtcatgcttataggtaacctcccagggccaaaaatatatgtgcccaaactgcctaaatatttcctgtcacttcataatactgcctgaaatcctgccaaattagaacttcatttgtgttgcttgtcaatttttaacgcataagcaaatcacctggagatcttgttaaaatgcaaattctgattaggttaggtctgggtctgcatgtctgatatgcttccagagggcactgatgctgctggtccatggaccacacttaaagaagcaaaaaagatgtctgatatttactctctggctgcctaggagtgcttctcatttaagtgagatctctttgtgcatcataatgggagggatgagctgaaaagcagcaaattaagagtgagttaagtgtctacctcacttccctactatctgtaacaagcaggtttgggcactgtggtcaaccagaaaattctttccaggaccacaacccttgagattatgttgcaaagatgcaaggacaacttagaaataatttccagcactggtggcactggatgtctgtcagtggtgctggtggcagggtcctattcagactgtggtttacctgcctggcccgtttggttatgggccattttctgagtaccatggagcatcgcccagctgacaagggcttgtactccacccttggtgcgcagaagggaagcttggctgctactaagtttggtgcaaagtaattgtggttttgccattaatatttgatacagtgagtccctactttcctcaggtgaaactagaacttaaggggacacgctcaagttctcattatacagtactaagtttcaaaaatcagcaattttatcaaacacatgctctacagcagtggtcggcaaactttttctgtaaggggccagagagtaaatgttttagagtttctgggccacatatggtttctgttccagctataaactctgccactgtagggcaaaagcaaccctccacaatacatacatgaataggtgtgttccaaaaaaactttatttgtggaccctgaaatttgaatttcataaacttttcatgtgtcatgaaatattcttttgattttttcccaaccttttaaagatgtaacaaccatttttagcctgtaggccatatagaaacaggcagtgggctgggtttgctgacccttgctctgaagcaatgatatctcgatccaatttatacccacaaatttttctccttgaaaccatgcatttaattctcatctcttcttaccatgacaataagaagttattctatataacaaagagattgtacccacccaagccagcatttagatcatgtcatttgcttcctcaaaattttggtctttataaaaatcaattaaagcaccttaaaaggtaagcagtgatgaaatatttgaaataattggctaattaaacatcacctaaatagaaactgtgataagaaccacaaatgcgaaaaggaatcatgtagtaactaatgtggaggatatcttggtttagagatttgatgaacacgagttttgatttaaaaaaatttgtgcaatactcactgctttggtggggagcttgctatgcaagttggtagaaaaatttatcctaaagtcacagttctctaccactctggattttctcgagctaactaccattccaaactattttaggcacagttactagtttcaagaatcaggcaaattgccctggtattagcactgttctttctgtggtcacaagtcaaactactgtggtgaataaaattagatgatttctttagtctttcctttttcagcccctgtagtcaatttccagtgctccattcaaagaaaaaccaaaaatgtccagaatataaccttattttaaaacttgttaaccactgatttcacttgttaaccaaatttttttttttttttttttgagaatgaatctcactctgtcaccaggctggagtgcagtggcatgatcttggttcactgcaacctccgcctcctgggtactggttcaagcaattctcctgcctcagtctcccgagtagctgggattacaggtgtgcacccccacacccagctaatttttttgtacttttagtagagatggggtttcaccatgttggccgggctagtcttaaactcctgacctcgtgatccgcccgcctcggcctcccaaagtgctgggattgcaggcatgaaccactgcgcccagcctgttaaccaaatttctaatcacacacacttgaggcccagtaaatgcctgctgaaaagagggtgctggtggtgaggcaactgaggggctaacatactgatagctgctgaaatcttctacagctctttcttgttagaacactccatcacggctcccaggcccacaccacatgaaggaacttctagctctcttgcttgctctttacccaaatgtagttagcaagtcctgggaactaaacagcattgacacacttgaagaagacaattaggcaaatcccaactgctgtgctcctgcagctaaagatgaagactcgtccattgggcagttgattaattgtacctagaaaattaatttcaatggtcccatgacaacatacgggcagtgaagctctagtgttccccctgggtggaatcttccaggatgtatagtctcccataccagctcatcctcccatttttccagattctggttcttctctcttacctagtgtgtagtgggccaaatggtggtcccccaaaaagatatgtccatgtgttaaccctggaaactgtggatgtaaccttatttggaaaaatggggccaggtgcagtggtgtgcatgtgtagtcccagaactttgagaagccaaggtgggagaatcgttggagcccaggagttcaagaacagcccaggcaacatattgagacccccgtctctataagcaataaaaaattagctaggtgtggtggcatgcacctgaagttccagctacttgagaggctgaggcagaaggactgctcaagcccaaggagttcaaggctgcagtgagctatgatcatgtcaccccactccagcctgggtgacagagtcagactccctgtctcaggagaaaagaaaaaaaggtctttgtaaatgtaataaagaatcttgagataagatcatcctgatttaggatggaccctaaatccaatgacatttgtccttacaaaagaaaggtagagggaactgtgagacagacacagaggggagggccttgtgaagcaggaagcatagatgcagttacaagtcaaggaatgccaaggactgtctacaaccagaagccaggagagatgcatgggatgatttctccctcacagcctccagaacttctggcctccaggactgtgaagaatcaatttctgttgttttaagccaccaagtttgtgtgtcatttgttatggcaatggcagtattaggactctaatacacagtataaaaaaataaaaatagggccaggcgtggtggctcagacctataaccccagcactttgggaggctaaggcggggagatcacttgaggtcaggagtttgagaccaaccaggccaacatggtgaaaccccatctctattaaaaataaaaattagttgggcatggtggtgtgcatctgtaatcccagttactcaggaggctgaggcagaagaatcgcttgaacccaggaagtggaggttgtagtgaatgccactgcactccagcctgggtgacagagctagactccttcatcctaggacacagccaagtcttacgtagcaaaaagaagttgttaaaggtctgtagttctgcattaagcaacacaggcatgtacctatgaattatatgattataaaagtgctcggacaggcccatttcaaacttggcctctttccaccaactgtgtactgtttctcattccataactagagattatgtctttatatcctgtcaaaaaagtgaatttttgtgggctaagacattatccctgtgttaaatgcaccagtcttagtgtaaacaagcctagttcctttttcattttggctgtctagtatgcatttgtatatgctaggcagtgtactaggcaccttaaatacattaccttgtttaacctctacaggattctgggaggtaggcattatccccattttatagatgagaacactgagaagacaatgttcataagtgcgtcacttgtctgagatgacatatttactaagtagcagaaccaggcctcgagctactcagtctgatttccaaagcccctgctcttaatcacatcaacttctttcctatatcacctttcccagagtgcgctctcatggataaagagcagaagtataagttactaggcagcagaaaactgtagaggtgggaagattagataaaaaatgtaaataagaaggctttaagacaccaaaatcaaatgtaaatactttataacctgaatcagtgcttgtgttcatgaggctagaggtcgtgcattttatctctaggtctggtgatgccaatcctgatctacagccagcagcaacagttccctagcctgcctagaagtttgtaaatgcatgggctttggtaggaggaagacgagagaaagcagaacagattattacaaacccagtgcattcccccttgatgggtcaacagcgatttctttgtaagtgaaggacagcacactggttttgatgactcacgagagagtaggagggaaaaagaagtctgaggcattgcctggaagcctcgctctgcttaaacaagtacactaatggctcatgcctgttactcccagcactttggaaggccaagatgggtggatcacttgaggccaggagtttaagcccagcctggtcaacatagcgagaccttttctctattaaaaataaagaagaaagaaagtaataatgattcaagttctcattctctacaaaattcacttatgactttccaaatgctagtgaaaacttttaggtattgcaaaactgccttaatgcataacgggattctcattttacttagtctaagatgactttttcactttgaacttctgcatctttatgatcgcttagctttctgacaagcaatttcagtaagtgtttatcaatttgcatccacacgctgacacataggggtctacttacatatccttcatgtaattgagcttttgtaaatcatctttctacatggtacacttctgattttgtgtgcagctttcttgtttaagcactgtattaaatgctctgcttcctacacccttaggaacaatgagaataaaagcgtaatgttggttacttcttcatatcaaaggaagttcatctcctggttattaaaagctattattaaatggccatctttttgtgcccctgtgttaagcactctaccaagataccattaaatagataagggccacactccatagagatgatggttctatattctgtattttctgggggagttctaatttcatgcaattccttcttcttaaataaaggcaattctctaaatatattacctaatgtgctttcactttcatattcttgtaagatttttcacataaatcaattctcaaaaaatagtatcataggccttttaaaaatagtcatgttcaaaagtcaggctcatgaataaatgtgtgcattcattacatatattttcataaattcaaatttaaaagaataagagtagctagaaggtggaagaaaaatcttattctgattaggaatgcacaatcacaagaaaatttgtgatatatatagtcattttattctgtattgttttattttgattttggtaagacaagaaacaatgtagaaagtttgacaacttaaaaaagtaatatgagtgtgagaaagtcctcttccaggattagcaaaaaaatggttttttttttttttttttccgagatggagtctcgctctctcgcccaggctggagtgcagtggcgcaatcttggctcactgcaacctccgcctcccgggttcaggtgattctcttgcctcagcctcccaagtagctgggactacaggcatgtgccaccatgcccggctaattttttttatttttagtagagacggggtttcaccatgctggccaggctggtcttgaactcctgaccttgtgatctgcccgccttagcctcccaaagtgctgggattacaggcgtgagccaccgtacccagcctaaatggccaagttttattatggacaattaagctgtagaataaaaatctacttttaatagctggcatagtgcctagtggttttgaagccacaagcaggtttacaaaaaacatttaaatccatctgaatctacagaaaactaagattacctaagcagaaaatgaaaatagttcaggattaaggaagattaacaaatgaagagtatatgtattttagaagtattactttatatttttatagtataataataatatttacgttcctacacttataatgagtttcgtatatatattaaaataatttaatggattagtatgtttatatttgcttttagtaaatttggtgtatgataaactcagttgtctacattgtgagactacacctgaggcaatttctgtgttgatatatacctgaatagcagatattacttgggagcaaataaaatagcttcaggcctaattttgcaagttcatgatgggagagtaagcatgacttcaaagaactgactttgagttaaaacttgaagaatgaatgtgacaacagcaagtataaaacaatgccaggcagaggtgggactgttcatgggtatcagggtaagtgtgttgataaatgctcaaagtaggaaatacctttcttcccccacacatgtcagaaaataactgcaatagaatgcaacgacatctcagagataaagtgttcaacttagctctcagagaccgttcagttacattttgtaatgacattggaattgattgcattttgaaggcaattctaaatgcaaagtcttcattttgttgatagaagctgggttatttattatgaaatttcaaaaattaagtaaaatatctaattaggattataccagcaaaggcaaatttagaattcaagacttcatgatccatggtaagattattttaatgcaactctgctaattaactgaaatttcctttaactctcacatctgccttttacttcttaagacatttttctagtatttcaccagagcaagatatcagaagggtaaatctcttaccaatgaactttgctaattcttagtgactccgttgaccctggtgtaaggatcaggaacaaagtgaatgaaatacattttaatacatttctgctttctctaattccaaagaccactctaaagaataagttatttgtgggtattatctgaaacttgggattaaaagagaccgtgattacccttcagggattttggcaaaacttaagccatttcatctgaagagcaaagcaagcctcccacactcttggcttattctcacaattatctagatatctagcaacaaaactcttgagtagtttgttaactacagatgccaagggctgacagtttcactttcagttttcagaatatcttttgtttcagtggtgtaagcacaccatcagaatctctactatttaaaataattaagttataattgtaacttccattagatgtagtacttaaaggaatctagaagacacaactcattaattataggaatttgactgcaaattcttctggggggtctgaattgcaaaggaggcatctttgtaagtcagactcaactcattactctgtgatgcaggctcctccaaatggcagcagaaacgtattactctctagaaacactacagtagtgctacaatttcagggttctgtagagataaggacaaattgacagaaacacattcttagaaggacagtatcatttaaaataaaaatactgtcataattgtacaccaggatagcttctccataataaattctttatgattttctgatttttagaaatcagaattgaactttttaatgtgaaaaaaatgagagaattgtttcaaaataggaccacatttctgtgtataattttaaaagtttaaaaatatttgattagtagactgataaactgaaacatttttgataagcttttcattacatacaaaccatataatttgtaaaaaattggaaattattcaaaacttcacataactaaagtgaccaaataaatactggagaggaaagaaaaggagtcaaatgaatctagcattttctttttttttttttttttggagaaagggtctcactgtgccacccaggtgggagtgcaatggcacgatcatggctcactgcagcctcaactttatgggcttaggtgatcctcccacctcggcctcccaagtagcagggactacaggcatgcgccaacacgtccagctaatttttttggtattttttgcagagacgaggtttcaccaggttgccgtggctgatctggaactcctggtctcaagtgatctacccaactcagcctcccaaagtgctgggattacaggcgtgagccaccgcacccggcctaatctagcattttctaaaaggaaggacccagcagtgaacggcaatatcaataatcatgttcaagactatcagacatgcaagctggggatgaatgggtggaaggggaaaatgatgaataaatgatgaacacaagtatagacccagtggatttgagatgcccaagatgccagtgagatattcaaagtttaactcaaaagccacttcccatatgaaatcctgacaaacactcctacgtccaactggaattaatttctcttctgggctcccacagcactctgtatttttctaatagcataacactattttgtttgtagatatttctctgatagcattactatctttcctctttatcacaactgtttgaagttcttttgcctcttgcatccactgttgcccaatcccactgctggaaggctcatcttattaagttctgtattcctagtgctaacacactgtctaccatagatgatgttcaataaatggttgctaaatgaattctcttgtgataatagcactatggcaacataatcgacggtaaaaatttcttctcaatgtttacttttagcagaatgcattcatttatcaactttcattgagaatatgctaatttccatgaccctgctaggaaataggaaaataaagatgaatgtaataaggtgctcattctactgaaagtcttgactagtggagaattatggatccaacttttcatgaaatgccttcagtggtaagaattctcatatttggaataaaaaatgttatgggttgtgccaagatacctacatacttcataattttgtagagggctgtccttactgcagaaatgtatactactatagtcatatgtggaaattctttttatgatgctaactgcatgctaaccagactttttaatttaatacttgcattaaataaaccatgctaggaatccaggaatctagcttggtttattttccatacaatgtactctttgtaatatgcatatactacataaaaattctattaatggcctcgtactaaagatgtgtctgttggggaatcagttattctgtataattttatcttaattgatatattaaaatctaccaaaaatataaactccgagtaaaagtatctgcatggtgtgcatatgtttattattttaagtgtcagcgtatacattttcatgccataaagttataaaatgaaaaaatagtagccttttatattaagttcatgcttatgtagttagtaaaaacaagaaagcaattaacatacaaaccatgatggtggttaaacttgcttcagtttgtgttttttaaaatttgaaagtgagaaatacagctcgaagtcagctcatattttcagtaagtactgatgaggatgtactggccctattgactacgctgaccccattaaaatatttgtgagtctaaaggttcatatgacgctgttccttcactctagcaacaggccatacatgtcttacatagggactctgttcaattcattaatacctcctgaagtgctcaacatcgtggttcatttatagtagatactcaatacatactccattaactgaattctaagataaactgtctgttactgacagaaattttcacttaagggagtctccgtggctgaaggcaattttgaaatcctgtaaaagaacccactcctctccccaagtaatgaagtttgtcagtttcaagcctgtaataaggtactgacttaaaattaattttctaataatacagtactgctatgtatctaatgtggggttagtcaatgataggaaaaaaacataagacagagtcacatttaaaaatgtgtgcttaggtgcatggtgacacctgcctgtagtccagctattccaggggctgaggcaggaagatcccttgagctcacgagtttgaggctgcagtaagccactgcactcagcctgggcaacagagtgagaccctgtctctaaaaaaaattcgttttaagtgtgctcaggacataacaggagccgctggtaacatgccatttccactgtgaatatggtaaggacagaatccctgtctctaggccctcttccactagtcaatctcatcatcaccatcaaggccaacattggtattctctcctctgagacaaagtctttgacattttctatactatactatgtcttcctctccccaaatgcatatacaaataaaatttgaatgcttctttctccatttagtgtaattttttttataacatagacccaattttcaaaccccacaatggtggattttatttgatgtattgtaaaaagcgctggattgaagtcaaatggcttgggagacctaaattctactcctgcctgtaccatgaaagagacaaatcccaaggctttgcagggcttcagcttccttgtttgtagaataaagaattataaaatcatctcttttggtcctactgggcaataaaaagctatgattctaagcctgttcccttttctcacctaagaatacaaatttgatacaaagaggccgcagaatgtgtcaaacactccctgttgcctggaattctctcttcctttgggttcagggataaaggtatgttatttcttaagtctccctttgctttcttctgcttgcctcgtaaatatttttccatcttggcagtcctacatgtcttctcactctacatgttttccctaggtgatgtgacccagcctgtggcttccactgccatccacacacgtcgctgcctctctccacatcagcatcgcaactatctcctggaagctttccaagtgctgaactacagtaacctcaaccgaactgctgttcattcaccccacaggcttgcccctcctctgcatctttgtgagaacctgagagtcatcctaaactcctccttccacctcactccccacatcaaatcgattaccaacttgtgctgattttatcttcaaatactctccagaattgtcgctgtcatggactgaatatttgtgttcccccaaattcatatgtcctaatccctgatgtgactgtatttagagacgtgacctctaaggagtaattaaggttcagtgaggtcaaaggtggagccctgatctgataggatcagtgtccttataagaagagactagagctgggcacaggggctcacacctgtaatcccagtattttgggaggctgaggtgggaagatcactcaaggagaggagtctgagaccagcctgggcaacagagtgagactccatctctacaagaaaataaaatagtcagacacagtggtacacacctgtggtcccagctcctcaggaggctgaggcaggaggatggcttgagcccaggaatttgaggctgcagcaagctatgatcacacctctgcactccagcctgggtgacagcatgagacccagtctctttaaaaaaaaaaaaaaaaaaggccatatatagcccagaagagcgtcctcaccaaaacccaatcctgatagcacctggaggacttccagcctccagagctgtgagaaaatttctgttgcttgcaccgcccagtctgtggtattttgctgtggcagcccaagctgactcatcagtgaccttctctctgttaccgcagagtagctcatcatcctctcttccctagagtccagccactctctcacatctacctacctagcagtatcactgtgggttagagtcagatcactgcggattaagtcctcattctgccactgcctgtgtaaatctgagcaagttacttaatctctctgtgtgtcagtaacctccctgtgaaatgaggctaataatagcagggttgtttcaacaaggcgatacatgcataatgcttacaacacagcttggcacattataagcattcaacgaaaagtgagctactattatctcatccgttatcagaataaaccacctaagccacaaggctgcccacatcatcctcatgttttaaaacacttcagtgggctccccaccatcaacaggataaagtccaagcttccttagcatttcttagaggctccatatgaatccccaagttccactacaggaacacaggtgaactttccactccaacctcaggctccttcgtgtcactcctcatccacatggaggtaagcagcaagagactccgtgcagttcctggtggttccctgaccctcaggcagactctccccagccctctgcctgcaacgtccttgccctttgcttcccttggccagctcccattcattctccttgattctgcttggaagtttccctctcaggaaggctttatgaaccttagtgtaggttatgaacccatctttgctcctttcataccttttgcaagcctttatttattatgacacttaaccattatcatactgaagtgacctgttggtgtgtctttgttccccactagacagaaaactcaagatcagagaccagttcttgttctttttttttttttttttttttttttttgtatcacagtgtttagcagcctgctatatggtaaatgtcagtaaatgttccacaaactgaatggaattgagctctggaatctagaccatcttttccatacccatcactcctgtcttagttgaagtccttatttcccatttgaagcaatgcaaaggatttcctaactctaatctctcttttcttcacaccatcctttaaacagccgacagaatggtcatcctaaagcacatatatcctatcttacatatcctagattcggaacctctctgggcttctcaccatataagaagaaagtctaacctccttagcaaggtgcataggtcttcaatgggctccacctcacttctctatatatacctatactcttgctacactaaacttctttcttactgttgctggaacaagttcaacgctttcaaacctccctgactttgcatatgcagttcattctgtcaggaatgcccttctctcttatgcctgggatattctcattcattccatatgacctatttcataagtcactccttaatgaagcctttcttagatatccactggggcaatcagctgcttgctcctgtttccacagcacattgttcacacagatagcacaggacttaccacaagttattataattttgtctgtcttgcccatttgaatccaagggcaaggacggaatcattctcatctttgtatgtcctgggaactagaactgtacctgagacataataaacacttgatatgtttgtaatttttaaataagttaatgaacggaatggctagaaaaagtgagaagaaactctggcttactgtatatcatactgtcatactaaaaatatatactgaagacagaatcacattatatcatcacttttcacgctataggccatgatccattatgaaaaagaggatagtaaaaaaatcacagggcacaatttttgtttctgtcacacacatgtgtacctgtatattggactggaatgtaaaacgcatgttccattgtagaacgtggttttaaaagaggcttggaaaacactgcatatggtcatttcttagtttagtacaatttattattttcgtaataacctcagctataatataagtctaccatgaagcattttggggagattaaatgagatgtgaaaagtaaatgtgttagatagactgaattcatatcatagcttgctctgatactttacaaaacatttaaccttacccacaagttttagtttcctcactaaagtcaccctgaggacagtaatgggatcttcctcacagagtattgtgaggaatacataagagaacgtacgtaaatgcctggcacttagtatttattcaataaatcttagcaatgatgatgataacaacatggtacctggcacataagagagttaaaaattagtttcttcagtcaaatgtgcttacattgatagttgatactaactggggttaaaaggtcattgctggcatctcagaaagatagattacagtgaaataaaaaatgactactgcttaaaatgaatgaagacttatttacaaagtcatgttcatctggtacaataatgaagtcgctcaattgggagaaaatgacaaataatacaagtgaatatacaatcttacttaagacgaaagaaataggacaccaggctaactatcagtctcctaaaccacaactttatttctgatacaaagagacagtgagacaatcagggcttccctcaaataaattacttaatctctcttcaattcagttttgcatctgtaaatataaataactacaatttcacagtatttccatttaaaaagttctagtgcaacatcagaaacaagaacttagtaggtgttcaaaaagaaatataagttctgctttgttagccagcaaatagttgcctgtttctagccctcacttcttttctcctaaatccctatattgcatttatttaacttaaagtgctggatgtggcactacgagaaagaaaaagatatttggtaatcttgttaaaatcattagacatcccaggctatctggaatcaccttgggctcacagttagacatcagctatggcttgttttatttaaaaattcatccactgatgcatgataatggaattcacaggagagcaatttaccaaaaaaaagaaatttattgatttataatgtgagatattaatttagccacaaatatttattgagcatctcctacatgccagggaatggactatatatggcaggaaaacagataccaatcatttatatcaggcatttttttctaatagaaggatattcgcaggagacaatgcatagcaccatgccttgcacgtaacagacatttaataactattagttgaataaaattggagactagaatgatacataaagaggcaagaaagagcaaagataagcctttctgagaatttctatcatgttttgctcaatagcttgtctttatccactgcttgtatttttccatgtagctaatcctcattggtcgttagaattgagacaccctttccttgaaatcaggagctataggaggccattcttcctactgggcattttctttctgggacagggtctcactctgtcacctaggctggagtgcatcatagctcactataaccttgaagtcctgggctcaaggaatcctcttgccaaagaggtgggattacaggcatgagtcaccatgccagcctatttggcatttctactgtagacaaagcagacttacagcagtaggtctacctgcctaatacaaaaagaaaaaaaagaattttaacaaacaaatgagggaatcagatccagaaagtgattcttataacttagattacttagagtagatctataatctgctctagatccactgcatacagtgggcccttcttatcatattccataaatagcacttttctcagcccagcttttgatgatagctgaacagactaacagtttgtctaacaaaggctagagaaggggatagcaaataatggcccacaggctgaatcctgcctgctgctcatttttgcaaagttttattagaatacggtcatttccactcattttcacactgtcaatggctgcttttgcgctacagcagcagagctgggtggttggggcaggggtcacatggctaacaaagactaaaatacttatcatctgaccttttacagaaagtttgctgatccttggagtgtacaagtattctatattgttgattaagaacagaaccacaagtattagaagttagaccagcaggtggtaaagctgatcatctactaatataatggaaattggggttcccaatcaggactcttgctttgatagaaggccatcttaacgaggagggagacacctgcaggcaaagtcagaattttctgcaggaaaagttttgagtccatttccccttgtgaacaagtgctcagctatgcatttcatctttagtaaccatgcttctatacctggttctccttggcaaagatttctttcttcagtaagtctcaagactttctgggaaggtagggagatatgggggtaaaagtgtcccaggacttactgaaggaagtgttttatgattatctgatagaatcactgtatcatggtagagaaggcaaacagaatataatctgaaaatagaggtgagggtgaacaaatgggcactaaaagtgaactcagcatcaggaaggtagcaaaacaagacatcagtcaaagatatggggtgattcagacctaaggaagatttaatgtgggatgtttccgtgtgccaggagctggacacttaagcaagaggagatccaggaatgttgctaaaaccatggcctccatactttattggaattagcacaacttatccttgtttctttcattttgcaatcaaaatctttaaaaacacattatttaaaaatacattattttaaaagctagaatgaaaattatgatatcatttaggtggtttaaaaaacatccaccagccgggcgtggtggctcatgcctgtaatcccagcactttgggagtccgaggcgggcagatcacgaggtcaggagattgagaccatcctggctgacacggtgaaaccccgtctccactaaaaatacaaaaaattaaccgggcgtggtggcgggtgcctgtggtcccagctactcgggaggctgaggccggagaatggcatgaacccgggaggtggaggttgcagtgagctgagatcgtgccactgcactccagcctgggtgacagagcaagactccatctaaaaaaaaaaaacaaaaaccatccaccaaaatgggaagaagtgatgaaaaattacagtccaagaagaagggccatagctgtttaaatcaattggtatatttgttatctaatataaccccacgtaacgacaggtatttaacaaatgtttctgctgaatttgacgattccatttcccttacatcccatatgcaatccatcagcaccccacatccaacccatcagtacatcctgtcagcattggctcccaaatataacctaaatctaacacatatcctactatctctgctgctacaactttagtctgaaatctcataatctcccacttgtactactgtagatgactctgaatgagtcttcttgcttccattccacacagcatccatactgatctattttttttttcaattttttgtagagacggggtcttgccatgttgcccaggctggtcttgaactcctggcttcaagggatcctcccacctcaacctcccaaagtgataggatttcaagtatgagccactgtgcctaaccctgactgatctttctaagcataaatctaataatgccccttccttgattaaacccttcaatgaattcacattaagcaaacaacctggccaggtgtgatggttcatgcctgtaatctcagcactttgggagaccaagatgggaggatcacttgaggccaggagctcaacatcagcttagacaacatggtgaaactacatctctacaaaaaatacaagaattagctgggcatggtggtgcacctatagtcccagctactcgggcggctgagctgggaggatcacttgagccctggaggtcaaggcagcagtgagctgtgattatgccactacacttcagcctggatgaagtgagacctggtctccaaaaaaaaaaaaaaaaaaaaaaagaagcagggcaaggtggctcacacctgtaatcccatcactttgggaggccaaggcaggcctcctggatcatgaggtcaagagatcgagaccatcctggccaacatggtgaaaccccatctctactaaaaatacaaaaattagctgggcatggtggcatgcacctgtagtctcaggtacttgggaggctgaggcaggagaattgcttgaacccgggaggcgaaggttgcagtgagccaagattgcctggtgacagagcgagcgagactctgtctcaaaaaaaaaaaaaaaaagaaagaaagaaagaaagaaagaaagaagaaatccttagtcctgtcttaactacttgagaggctgagggaggaggatcacttgaacctaggaatttgaggctccagtgagctatgacagcaccacggtgctctggtctggagagagtgagaccttgtctctaaagaagagaaaagaaaagaatgaatgaatgaacaaaaagaaagaaggaaaggaaaagaagagagagagagagagaggaagaaaggaaggaaggaaacaaaataaaataaaataataaataaataaacccaaatccaacttctttaccctaatcaacaaggctcaaataatctcatgccaactaagtctctgaacagctccttccattctattgccagattactccatctttcagccacaagacctttttatcttccttttaccagccaaacacaatcctacctcagaacatgtgcactttttcttttctctgacttgaatctcctccacccattatataatcttagctcaaagaggcttttcttgacaacttagcgaaagtatttatcccagtcattctctgctacattattccaatttattttctccatagtacatttcagcacataaagatttccttagtatgtgcttgttgcctttccccaacctcctaaaatgtcagcattccttgagggcagagactgtttcattcctgtatcatcagcacctaagacagttcctggaacataccaagtacttaataaaaatttgtttattgactagctatgacacattttacttatataatttcattttctcagcaaaatgaacactttgaaatgtaattaattactgatttttgcagtattttctaattatttaaataaaatatttactattttggtcaaccagaattcttacattgttttagcacccagatagcttctaaaaatgcttacaattaacacaattttatctagcaatatgtatttatcactagacagaatgcactgaactcttcttcattaataaaaagcaatccaggctgggtgcagtggttcacgcctgtaatcctagcatagtggaaggccgaggagggaggatcacttgataccaggaattcgagaccagcctggccaacatggcaaaaccccatctctataaaaaacacaaaaattagctgggtataatagcagacatctatagtcccagctactcaggaggctgagaggtgggaggactgcttgaccccaggagattgaggttgcagtgagccgtgattgtgtcactgcactccagcctgggctacagaatgatacctcatctaaaaaaaaaaaaaaattagccaggcatggtggcatgcacctgtagtcccagctactcaggaggctaaggtgggagggtcacctgagcctggaaggtagagactgcagtgagccctgggtagcccgcgccactgcactccagccctgagtgacagagacccagtttcaaaaaaacacaaaaaacagaaaacaaaacaaacaaacaaaaaaacccaatgcattgctgaaatgttaaatccattataaagaaaagtacaggggtgggcatggtggttcatgcttgtaatcccagcactttgggaggccaaggtgggcagatcacttaaggtcaggaattcaagaacagcctggctaacacagtgaaaaatgcaaaatacaaaataagccgggagtggtggcgcatgcctgtaatcccagctactcgggaggctgaggggggagaatcgcttgaacctgggaggtggaggttgcagtcagccaagatcgaactccagcctgggtaacagagactccatctcaaaaaaaaaaagtaaaaagtatatagttgattctgcagggacttaaaaaagtataaatatcttttttaacatcacaaagctctgatatctgcaggtttatgactaactactagctcactcccatgaatacacgtatgtaaacaggctctatacaatctacaatcccagactaaggggaaaaaactgtcctgtcactgtggtctccaacccttggcccatttctttcctcttgaccacaaaacttctcaggagttgcttgtttcctcttgatccacttatctttagcccactccaatctggcatcggttctcagtactctccactaaaactgcttttatgaaggccatcaatgacgttcatgctgccaaatccagcagacacctcctgttttctaattttttttattgttattttttaagagactgggtcttgctctgtcacccaggctggaatgcagtgatgccatcatagctcactgcagccttaacctccctgagttcaagagatccttctacctcagctgggactacaggcatgcacagctatgcctggctaattactcaatctttaacatagctgataattccctccttgaaacactctcaacttttaagaaaccctgttattttcctcctacatttttagccagttcttctatcagcttctccttatctgacctctaaatgttaagaacattaacaaagactgaacctagtttttttctccccttactgtactgctcctgggcgatgtcaatcagtcccattgctttagatactatctgttgaaacactgaaatcactggttttttttgttttttttttttttttttttttttttgagatggagtttcgctctgttgcccaggctggagtgcagtggtgcaatctcggctcactgcaagttccacctcctgggctcaagcaattttcctgcctcagtctcccgagtactgggattacaggtgtgtgccaccatacccagctaatttttctattttagtagagatggggtttcaccatgtgtccaggctggtcttaaactcctgacctcaggtgatctgcccaccttggcctcccaaaggttgggaaaagatatcccaatctttttcctatgatttcttaattgatctacttgacatatccacttggacttttaataggcatctcaaacttaatgtgttcaaaataaacctcgtgactttccctcccaaacctgtccctacctccctcaataactaatattatcattcttatattcatatattgaataaatgtttgttcccccaagtatttgttgctataaatttatgaagaattcttttctcactagttattataattaaaatgtaatatttattttctttaaaaactttactttgtaggattattattttttaaacagggaccaacaataaataacttctctacttgattaaaactagggcttcctcttgtgctccctcaggactatttctttgtaaaaacaataggctaaatcagtactggtgtcaaagaaatcataatctcacaactttataaatacagcatgtggcaagggattttcccatcttatatagtaataaaattttcagctgtgccatggctaaaagtttaccatcaaagttggaattttaaattagaggtagtcatctttctttctttttaaagaaatggagtctcactatgttgcccaggctggagtgcagtggctatttgcaggcatgaccacagcacgctacagcatcctggcctcaagcaattctcctgcctcagcttgccaagtagctgggactacaggtccctgccaccacacccagcagaaatatttagctttctgaatttctcaagtgtgtgtatgaatgagactagtggggtccttaaccaagattcacaggatttttagtgatttattaaataacttggatttgtatctaccagcatgttctttgaggtacaggtatgtcttttatatctcctaatatagttcattacaatgctaaatactaagatgtgatgctcacacactacagaatagccaagcaaatgaactacttattctcatagggctattataattaacaaattcttgtatcaccccatcattatcaacaacaacatgataggatttccttttatcttgaagagtctggaaaaagggtaacagagagatatttctgaggaacaaactggtaatgagggagctactgtgtccattacaatactccttctagaagctcaatacataatgactaatctctggaaaaaagcaagtgtgagaatggaaggctcttcttcaaactatgcaaaatgaatcaatcagcagtgaacaaatttatgagccaaacaaattcctacaaaaattaccatcatatgctgtcatgcatgtctgccagtctatttatcatattatttaagaaacaaacatttattgaagatttatcatgtgctcagcactgccaaagaggaaataaagagcataatatctattcttagaaaataacattaacacaaatagaaaacaagaaaccataatgttaaaaatattacatagtaacacagaaagacaatgtataattatacatacgcactaaagcaaagataacataatttataaattatgaggtacagaatagttagattctgaaaattaaaataatcaggaaaaacttcatgaagatgagatctgggctggatcccaaaggataggcaggtggatcatgtagaacaggggaaaggagttcctgatcggggatacaatatatgtaaaaactcggagacaggactgagcgtgaaatgttaatgggacagtaaagaaatcttcctctgcagcgggggaaaaaacagaataatgggaaactgcatggttaaaaggtttgatgttaagatagtgcttggacacaaaagatcttaaagttgagtcaaaagagtacaatgaaagcattagaaatagaagataaaacacaattaggccgggtgcagcggctcatgcctgtaatcccagcactttgggaggccaaggtgggtagatcacttgaggtcaagagtttgagaccagcctggccaacatggtgaaaccccgtctctactaaaaatacagaaattagccgtgaatgatggctcgtgcctgtagtcccagctatttgggaggctgaggcaggagactcgcttgaatctgggaggcggaggttgcagtgagccgacatcgcgccactgcactccagcctgggtgacagagcaagcctctgtttaaaaaaaaacggtaaaaataaataacatttactattgttttctgatgatatatatggcctctaattgtaaagctgaatgcctagtttaccactttttttttttttttgagacggagtcttgctcttgttgcccaggctggagggcaatggcacgatcttggctcaccacaacctctgtctcccaggtttaagcgattctccagcctcagcctcccgagtagctgggattacaggcatgtgccatcatgctcagctaattttgtatttttagtagagatggggtttctccatgttggtcaggctggtctcaaactcccaacctcaggtgatccacccgcctcagcctcccaaagggctgggattacaggcgtgaaccaccgcgcccggcctatcattcttattttatgcattaggaaactaaggctcaacaagattaaagctgtctagggtcacaaagattgtaagtggaggggctagaattcaaaatgagacctgcttgactcctaagcctgtaccatttctactatatttagagtgaagtagatgggttgaagaaatatttaggaggtgaaatttcaaaagtgtacagtcagaagagaagacatatatggaaacctaaattttcacacagtaaagtgtcaataataaaggcataatgccaaaatgacagaggctgtgcatggtggctcatgcctgtaatcccagcactctgggaggctgaggcaggaagatcacttgagcccaggagtttgacaccaacctggccaacacagcgaaaccccatctctactaaaaatacaaaaaattagctggtaatggtggtacacacctgtaatcccagctactcaggaggctgaggcattagagtcacttgaacctgggaggcagaggttgccatgagccaagattgtgccactgcactctagcctgggcaacagagtgagactctgtctcaaaaaaaaaaaaaggaagactcgagggctagaaccctgaaattgggaatgaacaggactggctgaaaatgtttcttgcacctgataaaaatcttgaagaagaatgctttaaatagataagaaaggagagagagaggtgggcagtgagaggagaccaccctaagtaatcagagattacttacgttggttactcaggctggtctctgaatctgattataaatgaaatagagattacttaaaacaaagggctgtaaggtagcactgtccagcagcactttctatgatggaaatcttctatatctgcactgtccaataaggtgtagctgctagcacatgtggccactgagtacttagaatatagctacgacaaccgagaggctgaattttaaatttaatttaatgaattcaaacaaatttatttttaatacagcactttaaattttatttttaaattttaatctattatttatttagagactgggttatgagactggctaatttttgtatttttggtagagacggcgtttcaccatgttgcccaagttagtctcaaactcccgggctcaagtgatccacctgccttggcctccccgcaaagtgctgagaatacaggtgtgagtcaccacgcccggcctaaacttaaatttaaatagccacgtgcgggtagtggctaccatactgcacatgcaactgtaagatgtagaagtcagatgtgagcaaagaaatgacaagccgttcaatgctgttagagaatgaaattcaaggttccaatgatctgaacttgtgtcccctcaaattcgtatgttgaaatcttaatcctcaatgcaacagtattaagaatttggggctttaggaggtaatttggttttgagggtggagccctcatgaataggatgagcacctgaggtagcctctttgacccttccaccatgtgaggacacaccacgaaggcaccatgttggaagcagagagtgagcactcccaagacactgaatctgccacatcttgattttgggcttctcagcctacagaactgtgagcaataaatatctgctgtttataaattatccagtgtaaagtattttgttatagcagcctgaatagactaagacaaaggtggactaaggcaggataacaggttagaaaaggaggcagggcctttttttttttttttttttttttgagacaaagcctcactctcacccaggctggagtgcaatggcatgatcttggctcactgcaacctccacctccagggttcaagcaattctcctgtctcagcctcccaagtagctgggattacaggtgtgcaccatcacacccagctaatcttttgtatttttagtagagacggggtttcactatgttggccaggctagtcttgaactcttgaccttaaatgatccacccgcctcggcctcccaaagtgctgggattacaggtgtgaaccatcgcgcctggccgaggcacagtgtttttacagagaagcctgtttaaggtttaatcatataaaatgtatgatatccagtaagttttgatataaaaaagaaacacctggcgattttatataatatattgtgctaaggaattttaagcactctacattctgctctctaagctctgtaaagagcaccagggattttttttttttttttctttttgaacagggtcttgctctgtcagccaggctggagtgcagtggcacaatcttggctcactgcaacctctgcctctcgggctcagcgattctcccacctcagcctcctgagtggttgggaccacaggcgcatgccactacatctggctaattttttgtagagatggggttttgccatgttgcccaggctggtctttaactcctgggctcaagcgatcctcccaccttggcctaccacgcatgcctggccacaacagggatttttaaatgtaagactacctagtcaactcttattctatattaacaatatagacaagaaataacctctaagtaatctctatttcatttataatcagattcagaggttctcttatgctttacaatattgtcctactgtgggtagcgcaataactaaggtaatctgaaagaccagttatattatatactatagttaaatgcatttcaactgcatgggagaaagcaactgtgttctttcctctcaattttaacagaaggaaaattgtcaaaattagcttatttagaatgtcctatcagagaattattttgattaaaatatatttttaatcaataaaatatttctctttggtcaatacttgtcaatatagaataatatctagccacaaaattaaaaaaaaaacattttcccctatattacattcatggatcttcttgaatttctgttatctaggtgcttttaaaagtcatatttctgataatatgaaatcacagctccttttctttggcatatttagttactgtattaagaaaatgtacaacacataatttagaatgggtaattattatattctctttattcttatattgaaaatgacatgaaaattaccagtcttcccaggtaatataatttaagttaaagaacatctacatactacaaccaatacccattcccctatgttatgtttggaaaaacatagaagtatctttagtagtactcttagaaattatcccaggttcagcatattggtattttatttccaggtttaagttacagtattttgggcaccccaagtttaataaactattccctgcagaaacctgacaagtgaagttgtggctgggaatatgttagtcttcagataaaatgaattgtttaagaatttgctaaagatctcaaagcatctttcttaaatctaaagaaagtcaggaacaaagccacaaccaggaccatagcatcagaagatggaaagttgctttgtcttcaaacttaaaaaacattttccattttaaaataattttactatttacctgtgatactgttgaaaattatgaaaaaacagataatttaaaatttagtgcttttttttaaaaaaaaaaaaaaagcgaatccctgggacacttcatatagtgcaaaacaacaattcaagaattcaagcattgaaagaaataatctcttatcccccagtctctgaaagggattgcctttactactgttcccatctttatgtccatatgtacctaaggcttatctcccacttacaagtgagaaactattcagtatggcttagtcatttttaatgcaagagaataggtaaaaatgccaagcaccagccagagttttttctttgcagatagatgtgactcttacaggagcagcagggatttcccactttgggcggaaagcagcatttaggtattccccctccagtgcagttacagaccacccccccgtagaagctgctcctgtcctctgtggcatgtcagcctctgattatcttttaataaacaatatggcatattaagtctcttttatgcccttctttgtattcccaggtaccacctccatgtcaggataacaagaatttggtaatgtttgttgaataaatttagcagaagttgaaagaaaaatcctgtttctacagaaagataccactggcttttggggagcccgagttcatgatgaaactaaagaaagccacaaaagttcacctcaatgccaagacatttcttgatttttgaaaacccagttgtcgaaccacccatctatagaaacttgaaagactaaaaactatcttactctaaacattttctaggaagttgattctacaacacattttggttttccaatttggcttctaataattatttcaaagtttctgtggcctaaattttgttttacattgatcctttgaatggactactgtttccacattttagaacatttaaaaagatatctacaacccgagtctaatcataaaaaaaatcagacagatccaaaatgtggaacattccactaaaaaaggagtggggagaggtctttattcttccaaaaatatcaatgccataaaagacaaagacggctatggaaatgttacagattgaaggagactaaagttaaatgcaagaaaggaaaaaatggcatataggacagtattgaattgactgacaaaactggattacaatagtagagtatcaatgttaaacttgctgaagttgctaactgtatttcttaggaattattcacctaagaatttaggcacacagatatgatgtatgtaagttacccttaaatggcttagaaaaaaatgtgtgtatattcatttacatacgtatctacacacacgtgtattagcggaagagagcaaggcacacatgtgcataagtgataaagcaaatgagatgaaatctttatttttaaatttaattttgtaagtttcagctttttaaaattttagattccggggatacacgtgcagttattacttgggtatattgtgtgaagctgaggtttggacctctaatgttcctgttgccacaacagtgaacacagtacccagcacgcagtttttcagcccttgccccctccctcccgctctccctccttgcttttggagttcccagtgtctactgttcccatctttatgtccatgtgtacccaagacttatctcccacttacaagtgagagcatgcagtatttagttttcttgttctgcgttagttccgttaggataattgcctccagttacattcatgtcactgcaaaggatttgatttcattctttttaatggctgtgtagtattccatgttgtataggtaacacattttctttatccactcatcaattaatgggcacttacattgatttcatgtgtttgctattgtgaacggtgctgcaatgaacatctgagcgcaggtgtctttctggcagaatgatttattttcctgtgggtatatacccagtaatgggattgctagctcagataagtatttctatttttagttgctctccacaggggtagaactaatttgcattcccaccaacggcgtgtaagtgttcccttttctccacggcctcgccaacatacgttcttttctgatttttaatagtagccattttgaactggtaagagatggtgtctcattgtagtttggctttgcatccaaatgagacaaaatcttaatgacaggtgaatctaggtaaaaggcatacagacgttctttgtgttgtttttttaacttacatttgaagttattttcaaatgaaaaataaaagcaagcaaaaaaaggtcattcttcatctagtaaactcttcaaagattaccacccccttcaacagtttttcctggttctagtgagtcttctcccatttgtttagatctttgttgaaatgtagtctcagataaaaaattgtatttttatttcttttacatatttcaaacaatctaaattctttttaaatgaaactcattaaaaatactgcatttgtttctaaataaaatggtagaggtaatttgcacctttccaaacagaagcaataggagcaacccagatgttctagccacgatccaagtcaaccacattcaatctaagaagtaattgaaggctgtaacgacttctgtaaggcctacaaaaatgagttcagacacaagctctgctcagtaaaaatctagtggcagatgatatatacaatgatctgagaaaaaggcagaatcaacaaaggttgtatttttatctattgctgcgtagcatatttccttaactttagtagcttgaaacaataaacatttattatttcataaagtttctgtggtcagaaatccaggagcagcttaactgggtggatctggctcagctgtagacaagatgtcggctgggacggccatcctttgagggctctgagggctttgagggctgcacgatccaattgcaaggtggctcactcacatactaggcaagttactgctgggtgctgggaggagaccttagtttcttatcacatggacctctccacagggctgctggaatgtcctcatgaccttccccatagtgagtattccaagacaggaaagtggaagccacaatgtctttcatgacctagcctcaaaagtgacatactgtcatttacacaatattctactggctgtacaagttaatcctatttagtctgggaggggactgcataagggcatgagtaacaagaggcaagaatccttgggggccatcttggaagctggctacacagaagagaaaacaccaggggagtgcgaagaaggtgcaattaaactcaattccttggtatgccaatggtaagaaatattaggtgatctctggggtgtaacctttttaatttagttcttcactgaataatctggccagtaattgtaatacaaaatacggcactctgacaatattctctccctttataatcaattacacaccagaatatatataaagaaagacttacaaagtcacaagtaattgtttggtattatttttataatcacatactagggccctacaattagcattcacaaacatcactccatgttggccagataagtctgtctttatagtggtttaccatacgcgccttagcatgaagttacatgtggtttccttagccatcagatgctccaaatgcaaaaaatgtctcaccacagtcacagaatcatggaatcctaaagttacctggggtttctgaaaatctcatgggaacaactcacgagaattaaggcttaagaaagtgatttatcaaagaacaaaaccagcaagacttgagtttagaactcgcagcagagttgtgactagaacctgttgaaataggcaatgtagaaacccagactaaggcacattctctacaactttactatgcaagtatgcttagatactccttagcaaacagcaggccttgagtaaattctttcagaactgaatacacaaaggatacagaacggaatacactaacaatagtgcatgatgtgctcatttctgtaatagaaatgaattaattctgatccatctataatttattattgctccatgattaacggaaggcataggaaagatgactggaatagtgtaactagtacaaacaagtattacacttgactgaacctcattacactgcaattgcatattatatagtatgtaggtgaacaaatactgggttagtcagtggacctacatttgaatactggttctgctcctagacagctgtatgatttgaatgacttctttatactttcatagtttctctgttcttctctgtaaaacaaaggcttagaagatattatgggttagattatgccccttacaaaagatgctgaagtcctaaactacaatacctgtgaatgtgactttatttggaaatagggtctttgcaagtgataaagaagaggtcatggagtgacctaatccaatacgaccagtgtccttataaaaaaaaggaaatttggatacagatacacacaaacaaggagaatatcaaatgaacatgaaggcagagaccggggcggtacatctacaagccaagggacaccaaagattttcagcaaatcaccagaagttaggaagagtcatgggacaggttctcacagtcctcagaagaaacccaccatgtcaatacatcattttggacttctagtcttcagaaccgtaagaaaataaatttttgttgttcaagctacccaatttgtggtactttgttacagcagtcctagcaaactaatacaaatgagctcttaacactggtctaaaataggataatcctatgaaatgctacaaatgtttgggaagatttctcatactcaactgtttacagtataccacaagcctgtcagttgaagatacaaacagaccctctataatcctctatacttatatgcaaggaacagcacactttttctgcaaaaggtcagatagtaaacattttaggctttgtgggccaaacaaggtttctgttacattttttttttataactccttaaaaatgtaaaaatcaccctcatcccaacggactacaggaacagacctcaggtcacatttgactcatagcctgacccctggtgtgtagggttaacaagcctcctttccctgggctcctttttctttcagcattccaagccaaaggaaactatctttttcaaatcattttctctcctaggtgggacatcttacaccagcccaggcatgcttccgatagccttagagtagctgtcccttcctcagaattactgtctaattggctagaagttagcaactttttacatttttccttcaattcctttccattaagaagaaggcatgcaccggcaaattacttgtgactatcaatgacatactctcagaagcaccagtacccctgtgttgtttctaaacccattctaatagacacataccccaaggttatgctgtttgtcatctcacaaaatgacttacatctagagatttaaataattaatgtacttttcataactaccaggtacagtagatctgataatggcagagctaagcacatatacagaaagtagggcaagggccagagactcattttaaagcaatgttacaagatcgtcactgttgcttttcatttttctaaatgtggccactgctgttttctcactaaaggaaatgttttatgtaaagtgaataacagtacctggcataaaataagtgctcaataaatgttaaggccttctctccctcttcaactggcctcctcatttttcacaaagtgaaatagaaaaacaacatggaagataatcctgttgcttaggaaaaataactaaagcttgctagacaaaatacacctgaaaatataggaagtgagctatagctggcctatatgcatgtatgttggaacaggacaagatagtgtagggtggggtgaagaggacagagaaatggaaggaaaggggctacagccttggtggcaaaataaaggataagacgactcttttaaaatggtctatttcaaatgctgggttgtgaaacttaatttgattacttcatgagaaacagcatctataatccatccctgatttttctacaacaaaaatttattatttattttatgtttgtgtgtagatcttttatatatatacatgtacacacgtatatgtatatattatatatgcatatgcatatatatgtgtatatacatatataatatattgtgtgtgtatgtgtgtgtatatataatttttttaaaggaatggggtctcactatgttgcccaggctggacttgaactcctgggctcaagcaatcctccacctcagcctcccaagtagcaaccaacagttttagttttgaaaaaataacaaatattaaacacccatgtgtaagggttggtactgggccctgtgttagtttgcatgggctgtcgtaacgtaacactacaggccgggcacaacggctcacgcctgtaatcccagtactttatgaggccaaggtgggcggatcacctgaggtcaggagtttgagaccagtctgaccaacatggagaaaccccgtctctactaaaaatacaaaattagccatgtgtggtggctcatgcctgtaatcccagctacttgggagactgaggcaggagaatcgcttgaacctgggaggcggaggttgtgatgagctgagatcaggccattgtactccagcctgggcaacaagagcaaaactctgtctcaaaaacaaaaaaacaaaaacaaaaaaaccctgataacactacagactgggtagctggaccaacagaaatttattttctcacagttctggaggctggaaatctaagataaagttgttggctggtttggtttctgaggcctctctccttaacttgcagatggctgctttcttgaaatgtcctcacatagctgtccctctgtctgtttctggtgtctccccacgtatccaaatttcctcttcttataaagatactagtcatattggattagggtccaccataaagacctcatttaaacttaatcacctttttacggccctgtgtccaaatacagtcacattccgagttccaggggattagggcttcaacctatgaattgggggtggggcacaattcagcccgtaacaggcctagaccttaatttgtcaacactacagttagatttatagtatagtaactgcatctgtgctcatctaaatgtcatacccaaatgaaataatatagcatgatgatctgaatttattaaaggcaatttttcctatagaaacccaaatctataaattatatacaaactgtggtaagttactcgataccttgccaggactcatctatggtggtagatagaccacaaagagtaccactgaaagatccctttcctaatcacagtttcctcactggcttgccacaaaacctaaaattcttctattctttcattggcaatttatttcccctgaaaatgtaaataatctctggcagagcaatctattaagtgatcatcagccactaacaccttagggtagaacagctcagatcacagtcttaaaataaattccatcagtatgaaattttctttattactgctccgctactggaatgttagatcactgtctgctttaataataattctggtgtaggtcattcaaattttgtttaagataataagacaaatagcaggtataaaaacattccgtcatctaataaagcaacccgagaacagtaagaagaacgtgatgaaattaacatttttgagtacctgctaggaatcaagtattctgctagatattttagaaatcatctcaattcaatcctaaaaattattctgtataatagtataggttgagtattcctaatccaaaaatctgaagctttttttttcctgagacggagttttgctcttgttgaccaggctggagtgcaatggcgcaatcctgactcactgcaacctccgcctcctgggttcaagtgattagggatactcaactggctaaatataatgcaaatatttcaaaatctgaaaaaacccaaatctgaaacacttctggtcccaaacatttcaggcaagggacactcaagttgtattaatcccattttacagaagaagaaacaggctcagataaatgaacatctcagagcttgttgatagcaaaggagagattgaaactgtcaggcctctgatcccaagccaagccatcacttcccctgtgacttgcatgtatacatccagatggcctgaagtaactgaagatccacaaaagaagtaaaaataaccttaactaatgacattctaccactgtgatttgtttctgccccaccctcactgatcaatgtactttgtaatctccgccacccttaagaaggttctttataatttcccccacccttaagaaggttctttgtaattctccccacccttgagaatgtaatttgtgagatccaccgctgcccgcaaaacattgctcttaacttcaccacctatcccaaaacctataagaagtaatgataatccaccaccctttgctgactctcttttctgactcagcccgcctgcacccaggtgaaataaatagccatgttgctcacacaaagcctgtttggtgtctcttcacatggacacgcatgaaagaaaccctacctggttctgtgtcttacctgttgggggcctgtggtcaaactactagtacggagttttagtgtcctcactttaaaaatgagggttgtggccgggcgcggtggctcacgcctgtaatcccagcactttgggaggccgaggcgggcggatcacgaggtcaagagatcgagaccatcccggctaaaacggtgaaaccccgtctctactaaaaatacaaaaaaattagccgggcgtagtggcgggcgcctgtagtcccagctacttgggaggctgaggcaggagaatggcgtgaacccgggaggcggagcttgcagtgagccgagatcccgccactgcactccagcctgggcgacagagcgagactccgtctcaaaaaaaaaaaaaaaaaaaaaaaaaaaaaaaaaaaaaaaaaaatgagggttgtaaggtaactacctactttttatagcattgtagtgaagttgaaatgaattaatccacatatattatagtgtggtagaatgcagcagaactgatgatgtatgacttctaagactagtccttaagagacctgcagtttttgcttttgccctcttggaacactcctgttgccatgttaagaaaaactctggggagactatgaaggaagagagcatactcggggcaggggggtgaacaggacgtgcacatgtacgagcgtacaagccaggtgacaccagtaccacagcctcagacatgtcaccggggataccagcaccacagcctcagacatgtcaccggggacaccagcaccacagcctcagacatgtcaccggggacaccagcaccacggcctcagacatgtcacccagggacaccagcaccagcaccacagcctcagacatgtcatcggggacaccagccccatggtctcagacatgtccctgaggcccacttagacccttcaaccccagcccagctgctaactgactacagccacatgaacagaaccaggtgagaccagaggaaacttccagtcacctaccagatcatgacaaataataaacgatgttttttaaaccacaaagatttggagcagcatttgttacacaaaattagacaactattacagttcgactaaaaacatgttcatttacaatactaaattagaagtgtaagaatgggagaaaaacttcatactttaaaagtcattttttcctccaaaaacttccaactttgaaaaactgatttttataatgcataaaaattaaaataaccttagaatttatatgagtagcatagccagctggctttattatctgttgtactcaacacttcaataatcactgatgttttagaactcttcagatttagaactcttgcccttgctttagtctggtttaagctaaataattgttcttcctcaagaacaaatgaccttacctcgttttgttttccttgtctgagagaaacacattagcagtctcccatcttgtttttccttttcctgtcacccaggacagagggcagtggtgtgatcacagctctgcagcacgacttccccaggttcaggtgatcctcccacctcagcctcccaaggagctgggaccacaggcacatgccaccacgtccagcttaattttgtatttttttggtagagatcaggttttgccttattgccccaagctgatcttgaattcctgggctgaagcaatctgcctgccctggcctctccaagtgttaggattacaggtataagccaccgtgcagccttatattttgttttaaattttcctctgtatttttctctctggcaaattgtttagggagtttctttagtttatcagactaaatttcaaggctttccttccaattttgacatgtaaacagtccctcatttctgcttatctagtgattattcccaaatctgtgtttacagtctagctgtctctcctgagattaagacttgtttctctaactacctgacggcagaatctcctcttggaagtatcaaggaggcagttcaaaactgaactgggcattggctccactccttctccttctctttactattaataccctttctctccttctatatgaccacactaagtcttatttaggcatcgtttcttctgggagacctttgtagaatctctgaggttatgttaacatgctaaggttttcttgacattctcagattgggttaggtgaacttttagcaacttatctttttactaaaaagtcatccctcagtatctgtggggaattggttctaggactccctaaggatatcaaaatctgcatgagcagcccaggtgagaccagcagaagcactttacagtcacctacaggatcatgacaaataataaatcatgtttaagccacaaagtcctttacataaaatggtatagtatttgcatataacctacacatcttcctgtatcctttaaatcatctctagtttataatacctcatacgatgaaaatactacgtaaatagttgttatactgtattgtttagggaataatgacaaggaaaaaagtccacgcgtgttcagaatagatgcttttttttctcgtctaatattatggatccacagttggttgaatccacagatgtggaatccatggataccaaggaacgactgtatgcattttgacaattatacttctcatcttaccatgcattcaacaaacagaacatgtaaagcggtgataatgctgtgatgaaaaataaagcaggggaagaggctgcatccatctagtggaaacgatgcccttttcaatctgcacaaagagaaaaagctgctctccaagttggggggtgggtgggtcaggtatgtaaattggtcaggaagggatctgtaggcacttacagatttgacgctaatgagatgggaagccacaggaaggttgtgaagaaaagacaagacatgatctgattcatgttttgatctgatacactggttgctagatggagaataagctgcatggcggtgagaggaagcagaaacaataggagggtaatgctataatccagtggtccataatccaatatccccccaaggaacagttcggcaatgtctggtgacatttctggctgtcacaactgttggggcggagtgctacttgcatctagcaggtagaagctagggatgctactaaacatcctacaatgcacaagacagcccttcccccaacattgctggcccaaaacgttgatagtaccaaggctgagaaactctgttataatctgtcctagaatgtagcttggattgagatggcagtggtaagagctggagaagtgcttagcttcccaatgtttttttgtttgtttgtttttgagacggagtctcgctctgtcgcccgggctggagtgcagtggcgtgatctcggctcactgcaagctctgcctcctgggttcacgccattctcccacctcagcctcccgagtagctgggactacgggcgcgtgccaccacacccagctaatttttttgtatttttagtacagacagggtttcaccatgttagccaggatggtctccatctcctgatcccgtgatccacccacctcggcctcccaaagtgctgggattgcaggcgtgagccaccgcgcccggcctgaatgtttttaaagtactggtgaccatattcgctgagggattaaatgtaaggtatgaggggaaaataggaatcagacaccagggtttactgcctgagcaatgagaagaacgacgttcctcatacggagatgaggaagaatgtggaatagcaggtaaatagcatgtgcttgctttgtttggggctgtgcagaagagactgatgggaccaacgtgctcagttctggatatattaaacttggaatgcctatttggcaccaagtgaatgtatcaggtaggcagatggataaatgagtctgaagttcaggggagaggctggggtggcaatatgaacttgggagtctccacatctgaatagtatttaaagctatacaacaggataaggtgatttaggaactaaacacaaattgagacgagatccgagcccagaggcactccgatgtttaaaaaagaggaggaaccatcaaaagatactaaggagaagccaagaagtaggagaactgagagtctgagagaatcattatactcatttgatcgactgcaacaaatgctgcttagaggtcaagcaaaatgaggactaagcaaggaccaccaggtctggcaacatggaggccaatgccgacgtggaaatgagagttttggtgggaagacaggaataaaagtctcacaggtctgaattcaagagagagaacagcagaagaagggtagaggtggtagccataaacaatgatacattctcttgaggccttttcttgcaaagctcagtgaagaaacatggttccagagagggatttttttttctctcattttacatatgcaaacatataaaaaagctgaaagaattgtttgacaaccacccttattcttaccacagattcaacatttaatgccatatgttttccctgtatgtactgtgtattgtttgaggataacttcccctctaaatatacctcggatgtatctcctaaaataagtccattctcctacatagccatagtaaccatgaacacacctaggaaaattaaaaatatattctcaaatatattatatagctgggtatattacaatttccccaatatgtgatttgcaaaccaggatcaagtcaaagtccatgcacagcatttggttgtcatgtgtctttggtctctattaataatgatgactgtttgaaaagacctgtcctatagaataaatttgactgattatgtcatgccattgaacttgtttttctattctagaaggatagttttttagggtagtgaatacatttattactcttggcacaatagtctaacatttcccaatttccttatatctctgccctttcattttcagaaaatcaattattccaagatttgtttttcatttatcatcacttattagctctgaagactcaactgagcaactttcagggtttatataccctatattcagaaaaaaactactaccatctctcatttaccctaagaattcataggagagcatgtcttaaagctgatcaataaccaaaccaaacattttattgatcatattacatttggaaagcaaaatgaatttcctaaaatttcttccctgattagcaaaatagtgcctccgaacacttgagggtgaaagttgttgtcaaatatgcctacatgactggaaattatgacatccaaatgagttcactgggtctgataataatatgctctacatgcttatgtctatgtaataaacagcttacatctggatgagaaaattgattatacaaatatttgggcttctacaactggtcactcatctgtaagtacttaaagcaacttaaaatgcaaactgacctaacaatgcttatggttagaattccaaagaatgtttaggcattgtcaggttatgttaaaacatcttctgccacaatcttcaagtgatttatcttttctgttgtgttgaatagctatagaagacaaatgaattctgcactcctgaattcaatgaacatttcaagtttcctcacttacactgtaagattacgtagcatattttaagaaataaattataatcattttatttcacttattgaacttcttttaagctttggcattagaattttaatcaaagcactgccacttgcttacagtgatggtttttaggctctttgggcctatggactatttcaatgaccttcactagccatctagtccaccttatcctaattattaccactgcaaaagaaaccctcacttgaataaatcagtagatgggcatgaggcacctcccaggagactataattattaactcatactaaaatcaaaattgtagctattatcactcatatggtttggctctgtgtctccacccaaatctcatcttgaattgtaatccccacgtgtcaaaggagaagcctggtgcgaaaggactggatcatgggggcggccttcccccttgctgttcttgtgaaagagttctccgatggtttaaacgcatgggacttcctcctacttgctcgctctcttctgccaccatgtaagatgtgccttgcttcccctttgccttctgccatgattttaagtttcctgaggcctccccagccatgcagaaatgtgagtcaattaaacctcttttctttgtaaattacccagtctcaggtagttctttacagcagtgtgaaaatagactaatacaatcaccttatggtaagtctgtctataaatcacctgaactttcacagactatctagaagaacatgtaaccagagtagttcttgatcatgctatataaattactgatacagaaatagagctagacaggaaggggctggtagtagagaatcatcctctggacatattctcacagcctaatctctagctagcaaattttataatatatataaaaatacaattatttcacaaaattaccatgaaacgattttattgggatattagacattactgaattacttgttctgtgaggtatacagtgaaattaacatgttataaaattgtggtagccggcccccaagatggcctccaatgaatccttcacctcttggtattcatacctttgtgtaggtaggtctgtgtaacccatagaatacagcacagtgacagtaggtcacttccgaggttaggttgtgaaagacactgtggtttctgcctctctctcagatcacgtgctctgggggaaaagccaggtgtcattttgtgaagacactcaagcagcctttagatgactgcaaccacataagaggctccgaactggagccactcagctaaaccactcccagattcctgaccatgtatcatttcatacacaatgtatgaaatgacaaatgtctgttgttttaagctgtttggggaataatttgttacataacaaaatataactaatacaataatacatactgatttaactgaagttgtaacttcataacttatttaggtactaaaaatcacagcaacccgatgcaaagtactaaaaaaaaaatccattaatacctattgagtactgttgagggcatgaggaaagctctttcatactccacataaaacttccttaccgtaatattcatggctgacctctactcttaactcctttctaggataggaggggctaactgatctgacagcaagtttgggagaaaaaattctgaggctcggccaacttcctctcttctttccatttgggatttggctgactgaagagggtcatttgttttggcctgctctcttacacagtaaatgtagtgggacaagctctattcttgttgatagaaaaactcgaattttaaatctgcctagttctttgcagctcgttgttgctccaaatctcagctaccttttgaaacaacttttttcagtaaacttaatttcaatcttcatgtgatttaactggatccaaacacaggcagataaaaaaggtggggcattacttatcaacctctaaactaagtttaattttgtgccctcatggagtttatagtatatttgaggtttaaactaaaacacctggttttaaacagaaactataaaaaacacgattaataggtgaggccgggcgcggcggctcacgcctgtaatcccagcacttggggaggccaaggcgggtggatcacgaggtcaggagatcaagaccatcctggctaacacggtgtgaaaccccgtctctactaaaaatacaaaaaattagcccggcgtagtggtgggagcctgtagtcccagctactcaggacgctgaggcaggagaatggcgtgaacccggaaggcggagcttgcagtgagccattgcgccactgcactccagcctgggtgacagagccagactccgtctcaaaaaaacaaacaaacaaaaaacaaataggtgaaaggccgtgatcattggtaagcgtaagaaaatctgagggagaaaaaaatatagatgcccaggccccatgccaaactcatggaatcatgcatgaaacccaagcagctgcagttttaacaagttcccaatatatagttgacccctgaacaatgcaggtttgaactgcctgggtccacttataaaatggatttgatttttttcaataaaagttacaccgagtgtgcctgcctctcctccctccctccctacatgctcctgctcttaagcctctgccatgaggcttaagacagcaagaacaacccgtcctgtttatttcaatagttttggggggtgcaggtggtttttggttacatggataagttctttagtggtgatttctgagattttagtgcaactgtcacctgagcagtgtacactgtatccaacatgtagtcttttaacccccatccaaccttcttccccaacccgaatccccaaagtccactgtatgattcttatgcctctgtgtttttatagcttagctcccacttttaagtgagaacataccatttttggtttcccattcctgagctacttcacttagaatactggcctccagctccatccaaattgctgcaaaagatattatttcgttcctttgtatggatgaatagtattccacgatgtacataaacattttctttatccactcagctcctcttcagtctactcaatgtgaaggtgacaaggacgaagatctttatgatgatccatttccacttaatgattagtaaatatacttacttttccttatgattttcttagtaactttttttctctaacttactttattgtaagaatacagtatataacacatatgacatacaaaatacgttagtcaacaatatatgctatcagtaaacttccagtcatcagtgggctattagcagctacgttttttgggcagtcaaaagcatggggaaggagagggtggtccctaacccctgtgttgctcaagggtcaattgtaataatacccatttaagaatccatggtatatatggtaagtgcaacaactctagaagagagtgctaggagttggaaaaggaaagagaaaacagaatttaaagcaatctgtaaaggacatgcagggtttagatgaggtggaagggtgagggaaaaccaacatctgctgtgagggcatattaactgccagacattgttctatgtcttacctcatttaagagaatttcatttcacacatggaaaaactgaagcccagagaggttaaataatttgcctgaggccaaaattagttaaataacagaagtgggattagtagatgttttcattttatcagtgaaactgagcctcagggaggttaaatattttgtatgaagtaacaaaactgagattaatatatggccaagtttaaatgagatctgtaaatctaatgcctacactaaaacaaaaaaaaaaaagtgggaagaaaaggtctatattgcttagcaaaacagaggtagggaagcaaaaataaacttacaaaatcagattagaccaccaaaaaacagtccccattttaacttatgtggtgagaaccatatattaaagaccaccagtggcttaaaaatctttttaaaaaatgaatctgttttcattattcattagtttttatctaatgaataatgtatcttaactgatacatttactaaacaattaccagctccaattagcactcagttacaattcaatcattaaactgaccctcaatttagctgtcaacctagtcaaaacagttaagtgattttacggtcatcctcagttgcagaagtataatgtttatggctggagtcattttatttttaactaacattttttaaaaagattgctttgtaacaatgtgttatgagtcctttgtggtaaatactgctttttttttgagacgcagtctcgctttattgcccaggctggagtgcagtggtgcgatcttggatctgaggctcctgcctcagcctcctgagtagctgggactacaggcatgcgccaacgtgcccagctaattttttgtttttttagtagagatggggtttcaccatgctggccaggctggtctcgaactcctgacctcgtgatctgcccacctcggccttccaaagtgctgggattacagctattttaaggactttttaaaaagtgaagctaaacatttattcatccctattcctcatctatagggacttgtgctctatttttctttgaagactgaagtaaaaattcacctttgtgagggtcttcctataattaaaattaatcattttttcctccatagcttctacaaaacattgcctgtacaactctatttagcacttatttcatcccgccttgtatgaaaactatttgtttacaaacgtttctacttctctttaggaataaggactatgcattattcactgttgtattctccctgcatttatggcagtcctttgcacattaaatacaagctttttggctctgtgcatctcttcatctggctgttcatctgtaccctttaaaacatcctttattaaaaaaacagtaaatgtaaaaaaaaaaaaaagccattgatgaaaaagttaatagctttctcaataagaaaagagtatcaattatgcatacgtctgaactaacaaacatgaatgaaataggctatttaatacattctgttttaaaagtaggtttggtcagccatgtaaattgaaaattgggagccaccaagataactcatcaacaaatatgcactatgtactaggcactatatagatgatggtgaaccaaacagatgtaatccttgctcttacagatctcacaacctactatggggccaaaaatatatgtgtatgtgtgtgtgttatacatatatacacacacatacatgtatatatacatatacacatacacatatatacatacgcacacatacacatatatacacacacatacatatgctatgaggaaaacaaacaggtggtgagaaagaattagagtaggggtagaggacagagggctcctcaaatagggtggacagcttgacacaagacactcgagctaagactccaaggatgagaagacagttatgtaaagaaaaggggactagcattgtcagcaggtagctaaggccttaaagcagacagtcatgtgctgcaatgccagcttcaagcgaatacagttactaaagcatatctaaccttctatgtgaatgtagttactaaagcatatcctccaactttccatttttcttttgctattgtttctaccacttctccttttctgttgacaattattttaaatttcctggctaaattaaatgatggcatgaactctggggaaagtaagactacctatgtccaaataatcctaaattccttctagtccttatgactgatcaattcaccctgaagtgacaactatgtcccaattaggaaagagtgtttctttatctgcacttaattttttgatttggaggcttcctgattgctaatcaacatgttgtgtgattacttcaacaagtacttatagaacgttattttgtcactggaaaaacgttctgctgctttctgaactttaggttgctctagagtctaggaagagtgactgtacctaaagcagttcctaattactggacattctcagatctgctagagctacatgtccaattacgagaatatactggaaaaagccctggattagaaatgagaggatgtaggttttagtaccaggtcagccaccttgttaatgcaaatttgagtaaattgttacttcttttaggccttgtttttgctgttttgtttttctgacagtatggtctctgtggtccaggctggagtgcagaggcacaatatcaggtccctgcagtctctacctcccaggatcaagccattttcatgcctcatcctcctgagtagctgggattacaggcatgtgccaccacaccctcgaactcctgacctcaagtgatctgcttgcctcagcctcccaaagtgctgggattagaggtgtgagccactgtgcctagccttacacattgttttcttactggtaaagtgggaatatctagaagttgcatgctacataaattcaaccatatattattggcaaaaaattttaaagaaaaacatcagcttaagagtactaattgagtacatgccttggaatgagcatgagctggaaagaacaaacctgttgttacatcactcattgctgttttcatatgctgctcattgtaaatcttgctcagtggcatgattttagtgtttaaagatttatttgtttgtttgtttaggacaaagtctctacacataatctacttgcttcatatatacatacttatgcatattatgtatgtacatacatgctctcagggctcacatgaaaaaacagccattcaggtgatgtgatttatctcatatgcttactttagagtcaacagggtgttgactccactatacaatactggcatggagaacacataagtcaaagtagacaggacccagccgtaccattggctagggcacaaatatattcacatatgtggagaatgatgtacgtagaaaggtcttcattgcacaatgctctttaataaagatctggaaaaaaaaaacacctaaatgttcaaaaggatagggtagatgaaataatggtacattataaaatggaagattatgcagccataaaaataaggaaataccttaaataataacagaacaacttttaaggtaagtgaacaaataaggtacataatcactatgcatagtatgtaccatttacatagaaaaagggaagaaaaataaaatatatatagtaatttatttgttcttacatgtgtaaaatttttctgaaaaatataccagaaactggtagcactggttgcttcctaggcagaaaatgactgagtatccttttgtaccttttgaattttgaaccacgtgaatgaatgtgttacctatgaacaaaatgacaagtttagatcagcaagacagcagtttgagatgaaatgggattacacccttagtaggaaaaactttttaaagcaggtggtacttctaagagcaaatacctgcacatggaatgttgaaactataaggaactctccttaagagatccatctattccaaacttctcattttatagatctgtaaactgagaccttaaaaattcagtgacttgcataaggtcacacagcagaagagatgggattagatgctagatattccaatatcaagtttagactattaaaaattcagtgacttgtgtaaggtcacacagcagaagagatgggattagatgtcagatattccagtatcaactttagactattatcacaccatcttctcattttctgggggcaaaacagaaccaagtaagtttgggctacattacgagttgtcatgtttttgtttttgtttttttgagatggagtcttgctctgtcgctcaggctggagtgcagtggtgtaatctcagctcattgcaatctctgacccccggggttcaagcaattctccctgccttagcctcccgagtagctgggtttacaggcgcctcccaccgcgcccggttaatttttgtattttttttttttttttttagtagagacggggtttcaccatcttggccaggctggtcttgaactcctgacctcgtgatccacccacctcagcctcccaaagtgctgggattacaggtgtgagccaccacgcccggccgagttgtcatgttttatctaaattttagagtctaatgtataaattaaccttaagccctgaaactactaatttcttgtttggatcactatacggctacacttaaaaatatgctgtgcatacctctatcattgcatgtatacaatatgatagatgcatgatatgacagacacacaatatgatacacgtatttttttctatcctaacacatctgaatttactgaaataactaaaatgtcttaagttacttttttaaatatacacatgcatagcacaagcgtgttgccaaaaatatgaatacaggtttacaattccttaactaaaacccaagggttggatgtgttttagaaataagaatttcatacaatttttaagtgttacagggtatataaaccattatataacacataccaggggccaagggcagcaccccataatcaaacatattaatatagtttcagcaaaacacatgggataaagactatatacagcttctcaatagttcaggtcatattttgctaccaaatgaattttgttgccaagcttaagaagtttttggttttcaccgctttctgaatgttagattgagatgtgggattacagactgtactcatagagtgcttctagaaagcagtcagtcacttcaactctcattttttttttatgagactaaaaaagaaatcatagcaagtagcttttatatcccaggtttgggccaaagacttgtattgtggttaaggaatctaacttagtagaaggtgcacgagctgacatcgtgagtggctaaaatgagagaaaaaaagagaaaatcctaatcatacagaagcactgaactactgcagctgttcgttagttattaatttaataaaagcttcctccctttaaatcatgtgagtttataactggaaataggtcaataaaatttctgtcccacactgctgacaagcgatggacgcaattagctttaatcccactggaaggtactgcactctctctgggaccaggatatgtagaaaaaagcatttcaaatatataggaataaccagaaatgtatacagtattctcaacttgggaccgttactctataatataaacgaaaggggttttctagtcaatctctgctgatctcctgtaccaaagttcttccctttataagtcttgtactaccttttacaagaggaaaaagctctagagcgaaaacacagaacacactaaaatcccttcctttctctttacaactcaagccccgcctccattttgtttctgttactaatttttcttctgaaaaaataccaaatttacactgaaagactaaaattcaactttgcagacaacgttttaaaaaatacaattcagtttggtgatgttgttttgcagtcttacaattttagctacattttaactgaaccaattgttttgttcaatttatgagttaatactcagcaagtttgttttttacaaatagtgtattccattctaaaaatggaagtagcagtggtgaacaagaaaacaaccctctgagttttgtctatttcaggaggaagtactactttctccaattttaatcacaattcataaaaaagaaaaacctaactagctagatcttaaatatacaaatacattaacaatctagtaaagcaacagaaaaaggtaaacaaactaaccagcctatttttgtctggagaaaccccaacaaactgctggattccttggccatttgcattcagaagtaccaaaaactaaaatcctttttactaaataatttcttctacacgagacttgtttcctccacaccaccctatccaaattgtcagcattattccagaatataatcatttagtttgagaccactaaaaaaccccgcagtccaaaataccaattgtggtttttctgtaaagaaatggtcagaaactacaaattgttatcctaggacacagaaccaatcgaccaaaaggacttctggaatatgctgcccccaagatttagaatgcacaggcagaaatagcatacgcggtcacgatgtcccttaagccacatgaccttcctacgaaagcaaaggcttaaacttatcaaatgagaactccccctttctctgaagttaaaacaaggcagggcagctggaattagagcagcagggacagatcggctgttgactagtcagaacgggtcgtggaatgcaaagtccctgcgctttcgctgctccccttaccgtgagaagatctgggagggaggaaaggaggagaaacaccccagaatcctggtagaaaagcccctggcctcgaagatgggctctagggagacagggaggggcagctccgtgtgtgatgaccctttgtgaacatgcactctgtggcagcttcagctccaccgaggctttgggagagcggactacggatgcccggcgcggcccagctgtgaaggccgcgccggcggagagggtccatggcacccccgccggcttcggaagcccttccctctcccacctccgcgggtcaccccaggaaccagcggctcccgaccacgctcgcgcggaccacggaacagcgacgcgcaagcaggtctctttcgtcagcgtaatccctccgcagaaagccgcgcactagttttaatcacgccccaccccctggccgctggcgccacctccgccactcgggcgctttccagcagcttccagaaacgtcgcctccccaaacccagccactcacacatggcgggctcagcagccaccggccccgcccctcctcgtcgccgcagtcgcaactgcgtctgcggccacagggcggacagccacgcctctgcggagggcgaccggaagtgctcacgtcttcaccttccccgccacgccaccgtcctttcaggcccagcgtgcagcaggaaggaggactcttttgccgcggactcaagccggaagccgccttcctagtggagacgcgagtgggggaggagcagtccgaggggaacgtgggttgaacgttgcaactagggtggagatcaagctggaacaggagttccgatcgacccggtaccaagaaggggagtgcccgcggcaggtaagggagaagagggaggggtttctttccgctctcgaaattgggaaaagagacagagctgggatgacctatggggtagtcggcgcgctgaaaggatgggctgggctgggacggggttcaagtgggaaaggttgatgattaaggtatagagttggacttacagatccgtttgggcgcagagaggtgaacgctgaagagaaaccagagtttgttttcgttttccaaggagcgtggagatgggcagggttaacggaccctgcgcctccttcggcttcttagtttgggtgttgaaactcacctcctttggtcctgttcgtctctgattcaagacagttgggtttggtacctgacagggctgggtgcagaaagctgaccctgttcctcggcttccaggtcggttgtggcctcgcttttgacagttcacgtgccgagcctactcgctctcggagggcgagctcaaatgggtgggtttaaggccccctcttcgaacagctgtttccctgggtttctccattttgcacacaggagtgtgaattaagtttaattgaatactttttgcgattcccagggccaccttgacacgttcattgtgctatctaactgggttcatgctgggctaataattcacattaaggcttctggagtataagtggttcacagaagtatgaaaaggggatgttagaagaaagatgctgggggtgaagtagagttgaggaagacagaactggaaagctaggttggtttcacagtacaatgagctttaggtcataatactacctttaggttatattgggctgtttggacggagtttgctgtaatcaggctagagtaaatagagaattttaaactaagcattgacaggctcagacttgtagaggcatcattttgacagtgatatggaagggaaagaggtagagatttgagacctttccaaagaactgtccacagaatttggtgacttactgtgcgaagagggaaataaagaatagggaacaactcaagactttctagtctgtgtgtttggaaggatggagacgcccacatttaagtgagatatgggaaggaggagcagattgtttttgaagggaggaagagcagttacttagggtcaaattaagttgtaaaatcccccccgggattttgtatgtaagtcaaagtgaattgtatttggaagaagaactggggagcccacctctggtattttttttatgtccctcatatggacaaataaacctctggtattaaatgaattttcttttgggggattctatatattcgggatttcaaccaccaacctatctggtttttcccgctgaaatgttgggtgatggaatcaggagagcagatttggagactctttatattttataattgagagagacaaagagaaaaccgtttgatttgaaaaagttttctaggttccctcaggtagatggaaattttcatcaaaaacagtttattcaaggtacatagcctactagtttcccatttgagagtaccgcagaatgatacgacgtgtactgcttctctacgcagaatgaagtataaaattagcaccaaatagtaactttaatttgtcaggtgctaaactttttacatgctttatctcatttaattcttagaagaaactaattttacaagtaagtgtctggaccaacatctgcaggtacaaagcctgaaaagcgtaagtttgactcctacatagttctcttttgtaagtagattataaatagaaccagccaaaggtaataagttgtctgtgcctaaaaagaaagaaaaaagttagcatcagtagttctcaccagaaggggtgattttgcttaccaggggacatttggcaagtcaggaaacttttggctgttggatctagagggtaaaggtcagtgacgctgctaaacatcgtcagtgcatagaacagccttcacaaacaattatttggtcaaagatatttgtagtgctgcagttgagaaatttctgtcttatggttatttcttcaggaataggaaattaagattcgccgatactttctttaaaaagcagttttatttttgaaattattccttggcttgaaaggtttgtgaagtttatatagccgaaccagaatagcgtaattagattttaaagtgaattgtgagccatcgattcccaggagatgggtgtcatagaatcatggattcttggatttgggaaagacttatgcctagaattattttacaacatttctgctaagtggtaattctcctctgccctaaaggtctcctgtatttgattttcctatcattgtgaacccacaattaaaatgctcttaattattttttgcttacactgagctccggtctcttgtaatttttactctgttaaatgtggttctgcaccataggactgcactcaaaacaagcttgccacatatgtaatttgtactaggacagtgtttatatttttgttcagataacaaaataagttaaatgtggtgtaaattagatcatttacaaataataatttgttagcagcttttaataagtagtatttttcccaactggtgaagtattaatgttggtagttgaaaacaataggaatgtatggaatatatggttcactggttcttttgttcctgtcaaatagtggcacaatggatctggggtttttctcagtataatgctggcatatttgtttcaaattgtacatagactctaaaaagttaggctttcaaattctggtcaatatagtttgctttaaatagtagctgcctctactacaagttttatttaatttgttgacaaatgagtctgctatgaaaaccggtcctgttgccagtcactaccctctgttcacaaatttgctgggtttataaatataggtatcattttcacttcaagattataattttagaatatgtttattctaggacatatagccctcaaaatctgcttactatatacgtcttataaaatagcatggttcttttttatagtaaatagaatttttatttaattgtctattgactttttttttccagggttcattgaaaaaatccttagtgatattgacatgtctcaagtgacataaattagccaatgactcggaatgatggattctccgaagattggaaatggtttgccagtgattggaccagggactgatatagggatatcttcactccacatggtggggtatttgggaaaagttagtgaacttattttttgcctgagtgcaaagttttttttttttctctatttttgagacttaaattcaattttgatgttaccagttaacttctaaaaaattgtgtcttccacggaaatcttacagtaatggcgaaagattgttttaatgtgtttacctttctgtgttttattgatacatgaaagtggaaataaaacatagaccttatgatttactgttctttgaaaatatggtacataaattctcccgggtaattgatgttacttttttccttgcaaataaaattgatactattcttaacacataaaatttaatatttaaaactataacataattctttttggaataatagctgtatttaaaggcttatatgcatttcttttgtttgccatgtttaaaataccttgtcaggatacttgtaattgaaaattataattttttctggttacctttccatttaacttttaatattttgatatattctaggaatgtctatattttaatttgctttatttctcttttagaattttgattcagctaaagttccatcagatgagtattgccctgcttgtagagagaagggaaagttaaaagccttaaagacttaccgaattagttttcaagaatctatctttttgtgtgaggatctgcaggtaaagtattaatcttatatagtatatataagatttttcttttttcttttgcttttttattaattgttttaaaagtttactcattttttgttttttagactagatttttaatatgtaatctcagtttgtaagtctgtctggtatacaatgttatttttccacctacctttacttggttgcgtaaagatgttcgtttttattgccatttgatttgcgagaggagaaaatacatttcaaggtttttttctttttttttaaccttttggaggtccttgttagctattagcatatagtagttactctctcatctctttggtttatctttgcaactgatgggaaaagttatgaatttctaatgtacctggaagagtattttggaaattggttagtccaaaaccagtatatatactctgaactaaagagagtatagaatcttgtaaattctaaaagatccttttagaagctctaaatcgcttttagaattatagtaatttgtaccgactggtacggcttttatatagcagctcattaaattctgtaatactccacattttattgtatttgacagtttatgagactgtctcatacacttttaattctcagaactttgcaagatttgtattcctatttcatgaataagaaaataaattgatttcagagggtttgggaacataagatcctgatacagtggcagagctgtggttggaatacagacttctaatttcagatctgtttattccagcaaaaaattagcagttcatcagaattacctggagtgcttttaataaatttctgagtatcacccccagatgctgattcaatagagttggcccagaattctgtggttttgtaacatttgaggatgagtctgatcatcatcagccaggtttggaaaatactagactaaatcacatggttgttaatagatacttatgctgggtataatttgaagtaaagtaatcccaggcgtgtctacaaatataaatttctttatgtttatattcagtaattttttttatgagtgtcactgtttggcactgttgcagatacaatgttaggatacaataataaaacaaaaatttcttgcccttaaggaagttatgtcatagagtgggaaagacagtgaacaagtatgtgtttttctgtcaggtgataaaaagtgctgtggagaaaaataaggcagtagggactggaatgccaaagtagggggagtttgcaattttaaataggatggtgaggggaacgcttcaatgaaaagtgcaattcgagcaaaagcctgaaagaggtgaagagcagtgagctttctaggcaggggaagcaagttccaggaaggccctgagagaatggaggctgcctgtcatgtttgtgctactgcaatgaaagcagcagagcgatagaaggtggatcagaaaaataatgggggagctggaccaagtagggtcttataagccattgtaagctttctggcttttactatgggtgaaaccaggaaccatggcagagatgttggcagaggagtgacataagttgacttcagtgttaaaagcattactgtggctgcactgttgaaaatatatgtaatgggcaagacctgaagcagggagattagttatagtataatatgaattatatttggtccttgtctatggtttccgttacagagctaaaagtcttggaatttcctgaatgataagagtgtcctgttattcagaatgagcctgtttgctaacaccggggttcatactattgtggtgacttaggatggagccgtagatagcctcagatggggcaagtagctggaaagaccacatgattagagaattaacgggttagaacttttagccccacgtacaggcctccaggaaaggagtggaggggctggagatcaagctgtataaaaatatcaagatttggatttaatgagtgggttgctgggggctggtgccgtgtaggaggtggtatgcttagaggaagtggaagcttcatacctcttctgtcccataccttgccctactcatttcttcatctataccctttataatatcctttaggataaaccaataaacataagtaagtgtttgtttgagttctgcgagctgtccttgcaaactagttatgcccaagaagggggagtgggaacctttgtagccagtcagtcagatgtactggtggcctggatgtgggattggcatctgaagtggagggagtcatgggactgagccctcaacctgtaggatctgacatggtctctaggtagataacatccaaatggaattggattataggatacccatttggtgtcctctggagaattgcttggtgtggggaaaaagcccccacacatctggtcacaaaagtgtgctgggaggatagaatatgtgaaaattgtcataatcaaaatggagtcacttgtgttaaaaaagaaaaaaaaatcctgactggccaggcacagtggctgacaactgtaatcccaacactttgggaggctgaggcaggaggattgcttgatcccaggaattggagaccagcccatgcaacatagtgtggccttgtctctacaaaaaaaaaaatttaaattagctgggcatggtggtgtgagtctgtagccccagctacccgggagggggactacgggtgcacggcaccatgcccaggaggtccaggctgcagtgagctgtgattgtgccactgcattccagtcaggatgacagagtgtgagaccctgtctctattaaaagaaaaaaaaaagacaaatagatccaggaaaggctatgaagagagagctttcatgcataaataccaaaatatctcaaaagactctgcaaaaaccacacccttgcacaaaggccatcatgaaatacttctgaaatacacagaaaatacatcatgaaataaatacacagaaaatacttctgcaaggacatctgcccagcaactgcctggtccatctgtggacgggtgtcatccttgttattgatccttgtagccaagggtaattatctcaaaacaagtatgtgatcctccttattttcctttaaaaaccttttgtcttcccttacctccctgaacacacacagtttactatggcatgtgtattcccattggaatactttattcctgaataaatgtcactttctttttagaagcttctcttttctttttatttagattgataagtagaaaggaaaaaaagcttttttccctttggactagttgaaggcagttgcagtattctgggggagagggtggtggcagaggtgttgaggcatggttggagtttatttatactttgaaggtaaagccaacaggatttgctgaaagattgggatatggggttggaaagaggaatcaaggatagttccaagatttttggcttgaaaaattagaagaatggaatcgtgaattactgagctgggaagacttggaagagcaaggttttggggagaagatcaggactgtaagaatagagaagtccttgtccccaggagttaggtttttggctattaaagttagatgtactacatagatttttagttggttttttgttttttgttttttttttttttttttttgagacggagtctcgctctgtcacgaggctggagtgcagtggtgcgatctcggctcaccgcaacctccgactccctggttcaagggattctcctgcctcagcctcctcagtaggtgagattacaggcatgtgccacccagcccagctaatttttgtatttttagtagagacggggtttcactatggccaggatgggcttgatttcctgacctcaggtgatccacccacctcggcctcccaaaatgctggggttacaggtgtgagccaccacgcccagcccggagttttggtttttgaagcattctttttcaagtgataaagcaaaaaatatataatcaagaattttaagtatatactttggaaatgttaaaaaggaacatgagtaatttattattatttttttaatttctagtcagcaatgagagcccagtgtactttatgaagtagattggtttacaccaggagtgagcagacattttgtatgatgcacaaacaaggaatgatttttttgttttttaaatggttaggaaaatatcaaaataaaaaatgccagaaaaaatcaaaagaagggccaggtgcagtgtttcacacctgtaatcccagcactttgggaggccaaggtgggtggattctcttgaggtcaggagttcgagaccagcctggccaacatggtgaaaacctgtctctactaaaaatacaaaatagccgggtgtggtggcatatgcctgtaatcccagctacttgggaggctgaggcaggagagtcgcttgaagccagtggcagaagttgcagtgagccaagatttgagccactgcactccagcctgggcgacagaggagactctatctcaaaataaataaataaataaataaataaataaataaatcaaaagaagaataccctttcataatatgtgaaaattaaatgaaattcaaatttcagtgttcataaataaagttttaccggaacatagccatgctcaatcatttatgtattgttcatggcttcttttgcatacaacaacagagttgggtagttgtgacagactatgtagctcataaaatctaaatatttattatctagccctttatcagtaaactttgctgatccctgtataagtcctctgaatcaaattatttccaaagagttccgttataaaatttggagtttactctgctgtaaattgcaaagaaccatttggaaaacctcttttagtcaggtatttacattaaaatgttccttgatttgtaaacactaatattcaagactggtccaaaattataccaaattgaaactctcaagtgtttttaaacagtaggaagttttaactttttttttttcgtggagtagtctatcattcagcgtttactttggaacatttaattagtcttttttaaaaacccatgaaatttataataaaaattttaaatcattaatgttgagtaatcaaagaaaactttttttgttttctccatttgtaaaatgagtacattattattataatttgtctttggccataccttgttgataattacttatacaagtataagaagacatggtatgttttcctttttcctatttcacaagaataagtacaggaatttacttaagctgctccaaaactcagtgaaagagacaggattaggtttttttcagcattggattttaaatgatactagatggttgcgctgggctaaaatactaatgctttgtgtatatttttatgacttttttgaagacagcttaaaagctttattctagttataaaaatgatacatgttcactgtaaatagaaacaagtcaggtatacagagatacaaatatttagaacatgtggaaagaggcaacaaaattttataaaaagaaaaaagataaaaatctgaaatcattaatttataagggaaaaatcagggcaaggacaaattatattacagattggcctatggtgggagcacagattatatagagaaaagtcagtgaagacacttgcgaagagtgtgggtggaaatcactaagttttgcagtcccggggcctcttatggtttattactgttttgttctttttttttttttaatatgcattcctttggaaccaagggtttattatgttttgaataaagtagaggtgtaagtaggatgcatataccatgatcttgactacttgagattcacaaagggttttcgtctcaggatttttttttctcttaaaaaaatttgtattaatttttaaattgtaaaaaaattcatcaacttaaccatttttatgtatagagttcaggagtattaggtatattcacttgtgcagcagatctctagaacttttttcatcttgcaaaactgaaactctgtacccattaaacaaccacttcccattttcctctcccccagcttctggcaaccattctagtttctgtttcttttctttttttttcttttgagatggagtctctgtcgcccaggctggagtgtagtggcatgatctcggctcgctgcaacttctgcctgcgggttcaagcagttctcctccctcagcctcctgagtagctgggactacaggggtgcaccaccatgcctggctaatttttttttttttttttttttttgtatttttagtagagacgggggtttcaccatgttggccaggctggtctcgaactcctgacctcaggtgttctgcctgcctcagcctcccaaagtgctgggattacaggcttgagccactgtacccggcctctagtttatgtttctatgaatcagactcagtacctcatataaacggaatcatacagtatttgccttttttgtgactggcttatttcacttggcataatggcctcaagattcatccatgttgtagcatggatgaatatacagttaggagttccttttcttttttaagtcttaatctccagtttatttctgtttatttatttattttattatactttaagttctgggatacatgtgcagaacgtgcaggcttgttacataggtatacacgtgccatggtggtttgttgcacctgtcagcctgtcatctacgttaggtatttctcctaatgctatccctcccctagccccctacccgccgacaggccccggtgtgtgatgttcccctctctgtgtccgtgtgttctcattgttcagctcccacttacgagtgagaacatgcggtgtttggttttctgttcctgtgttagtttgctgagaatgatggtttccagcttcatccatgtctctgcaaaggacatgaggagtttcttacttttaaggttgagtaatattccacattatgtgtatgccacattttctttatccattcacctatctgcagatgtttgagttgctttcactttttgggaattgtgaataatgctgcagtgaatgtgggtgtgcaggtaccttttcaagattctgcttttgagttttttttggatacgtacctttttatgatgctttaaatacatatatgctatttttaaaggattctcagttttctgacatatgataggacttaggaagtaatctcaaagcatcatgttgacaggttgttagttgatggtgactgcagctagttggaaagtcagaagaatctagaacttgtccatttatactaaagaatttcatagtaagtgcagtattatgagtgtaatgttcaattggtagaagaggctatctgaggggatttagtgcatttcagttatctgttggtgtgaaacgaatcaccttgaaacttagtcgctcaaaaattttaatggtggctgggcatggtggctcacatctggaactccagcactttgggaggccgaggcaggcagattgcttgaacccaggagtttgagagcagcctgggcaacgtggtgaaaccttgtctctacagaaaataccgtggcaggcgcctttagcaccagctacttgggaggctaaggttgtaggatctcttgatcccaggaggcagaggttgcagtgagctgggatcgtgccactatactccagcctggataacagagccagaccctgtctcaaaaaaaaattttaatggctccatttattatttcacatgattatgtgagttgactagggaattcttacacatcacaccatgtcagctgggacagctgaaatgtccacatggctggcagttggtactagctgctagctggaagttgagttcaaatagtcagccaggggtctcagttattttccatgaggttctctccatgaggccagctgggctcttcacagtgtgatagctgggactaagaaggagtgttccagaagaagggcttgtcctcttgagccagtgcttatcaggcctctatgtatatcatgtgtgctaatgttccatcaaagctagtcacagggccaagccaactctgtacagtgtagggactggctgcaggagggcatgaattaccaggaggtgtagttctctagttcatagggagggccatcaagatagtagtctaccatacttgtgtaaaagaaggcattaattaactattattattattattattattattttagagacagggtcttgctctgttgcccaggctggagcagtagagtggggcaatcatagctcattgcagcctccaactcctgggcttaagcaatcctcccatctcagcctcccaagtagctgggaatacgggagtgtactgccatgcccacctgaaaaagaaggcatattttaaaagcagacctttagtgtagagggttcttgaatttgttatttaaaatattctggtagtttttaaacttaggaaagacccactgattcttttagtgatatgtttacattgttgttatttggcataaattgtgttaatgcacagtaagatttcatgaagtcattaaaattcagccacttggactctaaacccaataaagatgtaaaacagcagtgctatgagatgcatattcagtttcaaaatataggaaacacagaaattactctgtgcacttttaatttgaaaatacttttaaaatgtgtagtataatgtagtgtctgtcccaaaagagtaacattcattatagtgtttctttacgttgttgaaaattttaaattcacttaacattagatttttattaaagcaaaaatatgttttccttattagcttacccttttgtaactcagattaaacccttgattgttcaaattaacctgaaaaaaattattcttttggaggccaaacttttgattaagtagttgtttgtctctaattttttcaaatttatgtgtataaatataacctgtcatcaaatcaatgctaacattctatacatgtttttcatgatatgaaaactataaaacatgaagttatttgaatttgtgtagtttttatcattttatttttactttccagtgcatctatcctttgggctctaaatcacttaataacctaatttctcctgatttggaagaatgtcacactccacataagcctcagaaaaggaagagcttagaaagcagctataaggattcacttcttttagcaaattccaaaaagactagaaattatattgctattgacggtggaaaagttttgaacagcaaacataatggagaagtatatgacgaaacctcgtcaaacttacctgatagtagtggtcaacagaatccaattaggacagctgattccttggagcggaatgagattttggaagctgatactgttgacatggctactacaaaagatcctgctacagttgatgtctctggaactggcagaccttcccctcaaaatgaaggatgtacatctaaactggaaatgccactggagagcaaatgtacatcatttccccaggctttatgtgtccagtggaaaaatgcttatgctctctgttggttagactgtatcctgtcagctttggtgcactcggaagagttaaagaacaccgtgactggactgtgctcgaaggaggaatctatattctggcggttgcttacaaaatataatcaagcaaatacacttctatataccagtcaattgagtggtgttaaaggttggtactaatattttatttttatttacttatttattcatctggagtcagggtctcattctgtcacccaggctggagtgcagtggcatgatcatgtctccttgcagccttgacttccctggctcaggtgggcctcccacctcagtctcccaagtagctggaactacagtcgtgcaccaccatagccagctaagatagtgagatggtggccccactgtcttgcccaggctggactcgatttcctgggtgcaagcacccttcccgcctcagcctcccaaagtgctgggattacaggcatgagtcaccattccagcctacttgtctttaattcttaaaaatattaatgttgagttttgtctcccagcatgtgggaaagatgtcatccattgcttctgtttcctggaggcctgggagcaaggagcccaggaacagtatcacgaagcttgagataataccagttacattatcctgactgcccaaaaggcagtttttttgttttttttttttatactttaagttctggggtacatgtgcagaacgtgcagttttgttacataggtatacgtgtgccatggtggtttgttgcacccatcaacccgtcacctatattaggtatttctcctaatgctgtccttccccaacccctccattccccatcaggccccagtgtgtgatgttcccctccctgtgtccatgtgttctcattgttcaactgtcacttatgagtgagaatatatggtgtttggttttttgttcttgtgttagtttgctgagaatgatggtttccagctttatccatgtccctgcaaaggacatgaactcatccttttttatggctgcatagtattctatggtgtatatgtgccacattttctttatccagtctatcattgatgggcatttgggttggttccaagtctttgctattgtgatttttttttttttttttttttttttaagacagagcctcactctgttgcccaggctggagtgcgatggcatgatctcagctcactgcaacctccgcctctcaggttcaagcaattcttctgcctcagcctcccaagtagctgggactacaggcgcccaccaccaggcccagctaatttttgtatttttagtagagacagggtttcaccatgttggtcaggctggtcttgaactccagacctcatgatctgcctgccttggcctcccaaagtgctgaaattacaggtgtgagccaccatacctggcctaggcagtctttttcaaaactctaagactgtgcttgtgtctcagggtgtcaggataatagtggttagttttaagtgtttaaactactgaaaagcagaatgaagaagtgagtaaaaatcacccataatcacacaacctcctaagatctcttggcacaataagggatatgtttttcattttattctctgtaaaataggatacttatgaacccacctcccaacacaggaagaattaaaacattcccaataacttacatttacctatgcgtttcctcccatcccattctctacctcccccccataagtaatcattatctgaaatgtgtttcatcattccatcttttcttagtttttcttacatgtgtttatctaaacagtatacagtagtctccccttattgtagttgtacttttcttggtttcatttaacccgaggtctgaaagtagatgagtatagtacagtaatatattttgagagagagggagaccacattcacataactttcattacagcatattgttataattgttgtattttattattagttttaatcttactatgcctaattataaaacttgatcataggtatgtagttataggaaaaagcataatatataaaatgtttagttactatccaaggttttaggcatccactggggtcttggaaggtatccctctcagataatgggggatggatggtactgaaccctgtatatacaatgtttttccctatacatacataattatgatcaagtttaattaagagtaaattaaatgtgggccaggtgcagtggctcacatctgtaatcccagcactttaggaagctgaagcgggcagatctcatgaggtcaagagttcgagaccagcctggccaacatggtgaaaccccatctctactaaaaaatacaaaaattggctggctatggtggcacacgcctgtagtcacagctactctgggaggttgaggcaggagaattgcttgaacccaggaggtggaagttgaacaatcacttgaacctgggatcacgccactgcactccaacctgcctgggtgatagaatgagactctgtctcaaaaaaaaaaaaaaaaaaaaaaaagtaaagtaaatgtggctcaacatgttgctgtcagttggaacatttgtttctgatcgtgtcttccacccacaaattgaatgctttttccatcttaacacttatcaggcactgtggccataacttgagcagttgagatgcaacagcaaaattagcacaaatttctttttctttcttcgcagtttcatggataagagatttgttcttagatctcagcaacctcagcatatgatttttttctttaagttgagaactttgacctttttacttagagaagcattttacagcttctctttggcatatctgaattgccagcattactatgctcgtgctttggggccattattaagtcaaataagggttgcttgaacacaagcactgcaataccatggcaatagatcgcatcaccaagatggctgctaagtgaaccacaggcaggagtgtagacagcatggacacattagacgaagggaagattcacgttgccagtggaacacagcaggacagcaagagagttcatgatgctactcagaatggcatgaaatttaaagcttataaattgtttctggaattttccgcttaatattttcagaccacggttgagttcaggtaactgaaaccataggaagcaaaacacggatgaagagggaccacttcgtattgcctaatttagtttgttttgatcttctgggacctttttttcttgttgtaaaaatttatggggctgtttatagttgtggctcattgatttttcattgctacataatacttccattttgtaaatataacagaatattcatctacctgtcagtggacagtggggtttttttgccattataaatgctgctgctgtgaccatttggggggcaagtctcctggggcacagtatgagtttcccttctgtataacaaaggaatggaaaattatagactttcgtgtccaaatttacaagataatgacaattgttttccaaagtggttgtaccaagcaattctcccattaatagtgtatataagaggtcttcctgatccatatattcttcttggtttattttcacacttttgagatttttgctatttgagtggtataaaatggtctgtgatcttgatttgccgtttccacattttgaagaggttgtcggctctatgtgtatatattgctcatatttgttccctcttctgtgaaatgccttttgtatcttatccctatttgttctgttctgttgattgtcacgttttaattgatttgtatgagtttgttccttgtatcattgttgctagagttacatcagatgtgttgctgaatctgctcccagtttgcagcttgtgtttttactttttaaaaactgtcttgatttatagggaagtctttatcttttcatttggagctagtaatgtttgtggctttttaaagaaattattactattcccaaggtcagaaaatcattcacctatattttaactgaaaagttataaagttttgcttttgacattgaaatttctcattcagttggaattcatattgatgtgtggtatgaggtaaggatccatttttttcccatttgcatagccagtttttgtagctccactttattttctcacttgatctgccatgccacctctagcatgtatcaacatatcatgtatgtgtgcagctgttccttaactctcaattttattctcttggttactttgtctaacccagcactcatactttttaaattattatggctaccttgtagggcaagaatcctcacttttattcaacttcttttgaagtgtcttgatgcatattttttctgatcttacttggccatatatattttggggacagatgtgacatcataccaagctttctttgcttgacattgtagatattttcttattcattaatgtgctaaaaattttgagtttggtcatacagtcttttatatggatcttatacatcgtttccctcttgttaaccattcaggctgttactagtttttgctgttgtgaattaacaccaggacaaatatccatatatcttttgaattaattactgactagtttcctaggaaagatattagaatatgaatattaaaggtcttgctgaatacagttttcagaatggttgtaccaatatataattccattttcattatgtagaaaaaatacctcagtgttttctaaccacctttggttagaacattcaagacgttatggttttgttaggtaagaaatattttgtttcagtgtaggttttctttgagactgaacttttttgtgtgtgtcagtcatttacagttttttgcaatttttaaaattcagtttctcacaagcattttgcctttgacttttcttctatttctgctttctctaattacagaaaccccagtgttaagtaggtgacagttcagttgtttgctgcagaagagcagcagttcaatattggaattaactttaattttatgtttttaatctgttactaattttttacagaataattgtagtttttataatctggttaattatatgtttgagctgcattactttgcaatgtaagtttttttttttggcatggtcaaataacaaaaattctggttaatgcttatttcatattacaggagaatccagatatttcattagggaaacatataagcagagtgtgatcaggctgtatgaattatttataagagatgtgagtgaaaagatctatttgtagcttaagagtaagtagagtcagatgcatgtagagtcttttattcaaaataattttcttattaatcttggatagtttcttgtcacagtaattccattttgaagataataaatattaccataaagaagtgatcaaaaacatagatatgtgtgcccaaaggtatttatcacaatagtatttataatagtgaaaaaagaaacaactaaaatgtctggcaataggagaatgattaataaagcgatgtttcagctgaatatagtggcatgcgcctgtaagcccagctactcaggaggttgaggctgcaagatggcttgagcccaggagttaatgaccagcccaggcaacatagcaagaccctgtctccaaacacacaaacacacacacaagtgctatgtttcagtcactgtataataactagccagattttttgttgttgttgttttgtttttgtttttgttttttgagagagcatctcacttgcccaggctggagtgcagtagtacaatcacagctcactgcagcttgtagaaccctaaccctcctgggctcaaatgatcctcccacctcagcctcctgagtagctgggactacgggtgggtaccaccatacccagctttttttctaagagataggggtttcactatgttgcccaggctggtcagtttttaatgaagcacatttgtgtagacaaagcaggatgtggaaccggataaacactatgttgccactgaagaccccttcaaacccctcaaaaatgacatagaagggaaatatgagatattagtttgggaaataattgtaactttattaagactccttataaatttatctgttcctatgacctggctaagttcaataaaagttacacagagtggaataaatggttagacatcatttgtagtataagtaattgcacataaggaggtaactttagctgttttagagatagacatagtatctgaaaggttagttattttactagacctgtgattatttgggtgagaaaggctttcactgagattttacccattcagtaagtactaatgatattgtgctgatagcatatattaagggaatatatggtataccacagagaaagaattaaggaaattttgtgttttgctttttgtctgtttgcaaaacttactgactcagctttcattcttgggaatgtgtcagttttctgtgggaagatatacattgatgaggaattgataatgttctctgtattttcttagatggagattgtaaaaaacttacctcagaaatatttgcagagatagagacctgtctgaatgaagttagagatgaaatttttattagccttcagccccagcttagatgcacattaggtaagtaattggtaaaacttacttgtattatactcatctaccatatagaaatatgtacctcataaggaaatataatactgtttgattaccttggatgatcatattcttgggagagagaatctgagtagtttgacttaggaatctaccactgggtaagttattgtagggcagagctgttccatataaatatgtaggctggtgttccacctcttgagagtgggtgcagttctcagaaccaggagaattttagggggcatatcattagttgcttctctagtacgtttcctagtagacagatctagcatttttaacctcaattgtgcattaaaaagcaccgagggaatttaaaagtaaatgccaatgctggggcatttgaattaggatctcagggatggggctcaggaaatcagtaatttttagaaaccccacatgattgttatatgtacccagggtttagaatctcatctaaaccaaccatagtaattctacttccctaccagtgattggtttaggaatgtccttgtggtagagttttggccagtggatattaagagaaatatgctgatggccttttgggaaagcttcctcgcctttagaaagggcacaaggatgggacctctttgttctctgtgacttggtttttggcctgtgggagtggcgtgcagcaagtgagctagagagtctgtccaaacctttctaaatttttttagtattgcgaaaaggagctgcggggtttttttgtttgtttttgttttgaaagggctttttgttttatttttcttgtatccttgtattaactcttctattaatgttatagtagcagaatatgatactccctattagtaataacccatattatgtaaaatatcagtgccttctagtttttctctcaatgagtgacatttaacttatattaaaaaatgatatttatattttataataaaatcagttgttgctactgatttgtctagcatgtacaaaagacaccatgcttccagatcattataaaatatgatattttataatatatttacaatatatttataacatatttatatacttagaatatattttataaggctgggcttggtggctcatgcttgtaatcccagcactttgggaggccaaggcaggcgtatcacaaggtcaagagattgagaccatcctggccaacatggtgaaaccctgtctctactaaaaatacaaaaattagccgggcgtggtagtgtgtgcctgtagttccagctactcgggaggctgaggcaggagaatcgcttgaacttgggagacagaggttgcagtgagctgagatcacgccattgcattccagcctggggacagagcgagactccgtctcaaaaaatgtatatatatatatatatatatatgtgtgtatgtgtgtgtatgtgcgtgtgtatatatatatatcgggaagcatggcatcttttgtacatgctggacagcttttgacgtacttctttgactcatgcttctgccccctaattttcactttttttcctacattttattaaaattaatatataatagttgtatatctgctttatttttcatggacttatacatacatatttattctgttcttataaaagtctgatttttcgtatgccaaatttctgacatttcctcctctaggcctgaagaactgttgtaatttatgcatcagataggccctcagatggaatgaatattcttttttctttatatcaaggtgtaatttacatatagtaagaccgtttttaagtgtgtacagctctgtaaccctcactacaatcaagatataggactctgtcactctaaaacttctcaccaggttcatcacccccagccactgatctgttgagcgaatactcatttcaaaggagctttttccgtaagatccctagagtttagatggaagggctttcgtggtgcatttagcagataccatttcccttctagactccctacttcagttcccagttgaattaaagaatggtttctcccccagcctgagtcactacccttcttatccctgataattatttttggaacaaagttacatcttttgctccacctccgccatgggcctggttttctatgtaacagaaggaatttttaaattattgttttgtgtaatcataataattgggcaagcatacagctcttttcagtgcaggaggattcctctcttgttttactgcccattcaaggataggtgctatattttagctgaagatcttactaatgaaatgctctgtaatcatataacttatttaaagatgtgttttgagctctttcataatattttaattcatggagaactttatgtattttagacctgaagattttatattgtcattatgaaatgtaaattgtttgctttttcagttaatatatagttacaatagaatacggatttaaaggctgataatgaattacaaaattgtgctatatgacatactgtttatgcatacagtgttgcatattttcatttctaggatattgatttgtatttctacttacaaaaaaactttttaaaacttattttatggctgggcccggtggctcacacctgtaatcccagcactttgggaggccgaggcgggtggatcacctgaggtcaggagttcaagatcagcctggccaacatggtgaaaccctgtctctactaaaaatacaaaaaattagccggacgtggtgtaggtgcctgtaatcccagctactcgggaggctgaggcaggaaaattgcttgaaaccaggaggcagtggttgcagcgagcagagattgcgccattgcactccaacctgagcaacaagtgcgaaactccttctcaaaaagaaacaaaaaaactttttttaatgtttttgttcaaaagtagcagtgagactatcccgcaaaggtgactactaaaatagcctttgtaactactgatatttatagaatatgcttagggttagggtataactcgcttgtattatactcatctaccatgtagaaatatgtacatcataaggaaatataatactgtttgattaccttggatgatcatattcttgggagagagaatctgagtagtttgacttaggaatctaccactgggtaagttattgtagggcagagctgttccatataaatatgtaggctggtgttccacctcttgagagtgggtgcagttctcagaaccgggagaatatttaggggacatattgttagttgcttctctagtacttttcccagtagacagatctagcatttttaacctcaattgtgcattaaaaagcaccgagggaatttaaaagtaaataccaatcatagggacatttgaattaggatctcagggaaggggctcaggaaatcagtaatttttagaaaccccacatgattgttattgcttaggtaataacacctactgtctaccttgtggtcctgccaaggtgactgttcctggccatgttccaggcaactgtagttccaggctagggggagaactggaccatggaagtgaggctctgtccagggtaggggaagggatggaaggtgactgttcctggccatgttccaggcaactgtagttccaggctagggggagaactggaccatggaagtgaggctctgtgcagggtaggggaagggatggaaggactcagtctcttgggccaaatcggtaaggcagcatctaagctcctctgagaataggaaggagagcaaccaattggaaaaagaatgggaaacatgtagattctcctgcttaccttactttccagtctcaaagctggaagccagcattcactgttcagttattttcaatgacaacaagattcaaatcttcagttgtaaagttgttaaaggaaaggattagactgaaaagttaagaagaacggtagatgaagagtccaaagagttgaggctggtcatttaaccattgtgtggccacgccctctccacaggtggaacaagatgatcagaatagaaatggccaattctgatgtgtttctacagtgtttcactgattacattttttaacatctgtagcaaaccatttccataatttttttttttttttttagagacgaggtctcgctctgtcacccaggctggtatgcagcggcatgatcatagctcactgcagcctcaaattcctgggctcaaatgagcctcctgccttagcctcctaagtagcttggactacaggtgtgtagcaccactctcagctaatttatttcattttattttttgtagagataatgcctcgctatattggccaggatggtctcaaacgttcatagaaactggttttaggttcctagaggctggcagcaattctcagaggtaacgcaagcagtcttcctgccttggcctcccagtgtgctgggattacaaggtgtgagccaccacacctcatcaatttttgttttaatatactctaaggcttatcatagttccgagatctttttttttttcctgagaaatctagaaagatggaagacagtatgggtcttttgtggattttttgtcctaagaaattttcataaatgtctgccaaggaaaaggaaagagatcaaagtggtaattaaatctttaggatggacatttttagaaaaatgctttataaacttcccctctcccaactctgagtgacttattgtgtcatactgtattaacacatattcatgctgtaaatatagtaagaaaagacaatagttcacaattttggtttagtttttgccattattgattatgagcagtaattcttccttttctttttgaaggtgatatggaaagccctgtgtttgcatttcccctgctcttaaaactagaaacccacattgaaaagctcttcctatattctttttcttgggactttgaatgttcgcagtgtggacaccaatatcaaaacaggttagtttcttttgttttttaaaatgggttcttctagtttctccaccactaaggttaagagaacaatttgagcaccagacactacagtttgcttgcttctttaaactggaagggtcaaaacctcatcgtttgatagactgctagtaggatatttcctaaggagttcttcagtgggaaatagggacgatgagaggaataatacacctcccttctccagagtccttgctgagtagaatacctctcagaatgccatgaaactgtaggcatttttgtttattcctctattagaaatgaggggttttgcttgtttactttaggtttctaacattatagacactagttttaggctcttggaggctagcagcaattctcagaggtaatgcaagcttccccatttcttcccgtagtcctgtgaaagaccagccacctccagaagcctacacatgagtcttctcagccatactttctgcttttcctaatgcctctcagcagcgtattagaaaggccatgatcgatgtacctgttaccttcaggctttgcataaggtgtatatgaaacataatgaatttcgtgtttaggctcaggtcccatccccaggttacctctttatcttggagacacttctggtcccatacatttcagataagagatattcaacctgtacccaccacgtaaggagaggaataggttttagaagaggagtcagggaggcaaggtattcccagagggatattctcacttggtccatacctgagaaagttgctggctggcagttaggaagatgaccagactggctcaattgttcgtgtattcaaattattacaatagaaataactctttccacccccccccgccctttttttttttttgagttggagtctcgctcccgtcacacaggctggagtgcagcagcgtgatcccggctcactgcagcctccacctcctgggttaaagcgattctccttcctcagcttcctgagtagctgggattacaggtgtgtgccaccacgcccggctgatttttgtatttttagtagagacagggttttgccatgttggccaggctggtcttgaactcctgacctcaggtgatccagccacctgagcctcccacagtgctgggattacaggtgtgagccaccatgcctagccacacttttctttagcttaagtgcttaagttagaaaacttgaagtctctctaagttactcaagtaaaatgtgagataaaaatattacttttgaaggccgggcacagtggctcacatctgtaatcccagcactttggtaggccgaggcgggtggatcacgaggtcaggagtttgagaccagcctggccaacatggtgaaacgctgtctctactgaaaatacaaaaattagccgggcatgatggcggacacctgtagtcccagctactcgggaggctgaggcaggagaataacttgaaacccgaaggtggaggttgcagtgagctgagattgcaccactgcactccagcctggtcaacaagaatgacactccgtctcaaaaaaaattaaaaaaaattacttagatattcattatctaaatatgaaatcctttttaggtatttaaggagtagtcaaggagagttcagtctgggaggatgctccagggaatgcaggcaacaaaggttttgttttttttttaactggttaactcagatctactagaacagggtaagggaggccacagagtagacaccatgagcaaagctaaccctcctgagttgaaaaaattatggacgagaagttatcattgaaattaactgttggcagacatatccaaagaatatcgcaaggatttggtccctttatgcatcctgagacagatgaatgtgtggaatggcagctggtgggcaacagagcgatattggcatggtggtgatacagggaaatagtttcatcgtgttaaaagccatggaacaaagatacataatggctgctctgcagaaaaatccacgtcccctctccaaagggcctgttttactctgatgtaaaaattgggtcagataaattttcatattaagctttttgttgagtaaacttttgtaatagtccccaaaactcccactagaacagggtgagaattaacgttttattcatacctaggacttaaataatttagtgtaagcaagtgagtatgagaacacatctgtttccagtcttctatcattgctttatataaattctctggttttctcctcacagtaactcagtgaggaagatcctagtgtcctcatttggcacgtatggatatgacagcttgaaaggggttagattgattcccaagatgacacactgtaagtggcagagtcaggagacacacttaggctcttctggcctctaagactttcttgctcactgtggtatactccttaatcactacctgggttttaaataatataaataaccttgctgattaaaatcagcttaattgtagcttctctggaatccatatcttagttgtttgacagttttcggttgagtgtcttctgtgtgttaggaactcaggcactggaaatagtgtatctttgccaaatttactaattaggtagagagataatacacgaacacataatagaggtccagtgacttcgtaattaatctgatctttgggctgcttaacgttagctttgaatgcaagatgttaaatgcgttttagagatatatagcacaaactgtgagagctcaagggagggaagccactagccgcttttgtttgcttttttgttttttaaaaataatcttactttgttctaaaaataaaagtagttatagagggaaagctaaaatgaagtgacgttttcttaaatatgttttaatatgtcataacttaaaacttatttccacttaatctgaaggagaactgtccagcaaattcctttgtttttgtgaagctgtttttagtgccagcataagggctttttactcaacttggaaagtgtaacccagagtcagttaaaaacatagtcttcagaggcagatctcaggtctgttatttatcactgtactctatgtgtcactttccccatctgtaaaatggggataagaatagcacctgcctctgagagttgtttggaagatgagtgtccagtgccatgccctttgcacatagtttaagtgttcagaaatgtcagatgtcatgtggagaattaacacttacttgctgagacagtctcctttttataaactaaacagtaggagcctttacataacaattatctttgaaaatttaagaatttagcagaaatcagtgcatttgttgatatctttatgttgctttgcttttaaaatgttaacctccctgactactgatgtttttaacagacagtgcttcctcacaagatttataagtatttgctattgtttagaaaggaagcttgtatctcttaagtagctgctctttaaattacaaatatttttattaaagtggatgcagttgaggtttagtgtacatctttaaaggtcatctttttagatggcgttgctctcaagtattcagactaaagtgcaaatttagaacttgtgtaacctgtgaaaacaaaatttgttcacaattaatgctgtgtgtgtgtgtgttttttttttaaggattaaaaaaagttaagttgtatgtattcctgattttatgtttggaaacatccccttttcatttttggttgtctgtaatggctagccagtttgagttatttgagtaaggggtgagctcttaataaatttgacaaccttagaacagtggttcttcactaagggctattttttcccccttgggacatttggcaacatctacagacaactggatgccgttactggcatctggtgaggagaggccagggatgatgcttaacatcctacagtgcacaggacagtgcttcacagcaaagactctctggtgaaaaatgcagtgataccattgaggaaccctgtctttttttcttgcttcatctcatagttgaaagatatgggaaattaacatggagcatcttcacagagcttctttactagaggtagggaggaacattgccatattaacatgatttggggaaataagaaagtatgaatcacgaaaaaggggaggaatacttttagacattggtttaaattaatgtaaatgcatttaacgttaatgaatttgttatgtcatttttttataggcatatgaagagtctggtcacctttacaaatgtcatccctgagtggcacccacttaatgctgcccattttggtccatgtaacaattgcaacagtaaatcacaaataagaaaaatggtattagaaaagtgagttaaaattgtcttataatttttagtacaaaatgaaggtggatttacatttttcttaatgtgtaggattgaaaatggtgacaacaacttacctttctgaaatttgagttaacatatatttctgggttgccagctgcctcgctctatctggccagtgagcccactgtcacggtgaagccactgaaaagccaacttaggctgactctctggccccactctcctagtgtctttccttctttttgccttttttctccctttaaggatatcaagcttcagtttttctctcctctgccaagtgtatggagtttctagaattctgggatttccttaatcagatttcaagaactaagatgattcaaagataagccacaggctcatctctctgaatttccatcttctcctagatctcagcatgctaattcctcatcatcttgaaagctatctagtggccttgagcagatatattttcattgtattttgccagcttttctgtttgtcctcagttggggaggttggtcagcattaccttttccagtattaccagagaaccatctgtttaaactcacaggtcagttccatctcaggccgtttccctctgtctcattaatgcactcacacatgtacacaacctctctactcttcattttcagtctaatcgtacattaaggaaatgttttgaggtctaatttgatgtaataaagaaccgggaacattaacctttatgcccttgaatgtgccagaaacccttcagaatctttcctaaaggtttattctcattgaagtaataaatcctcagtttatcagtgcttacaggctcaaaagggaaaaagggcagtagtcccctgttccctcctccaggtatctactttaaaccttcaaattaaggtagtatttacttttacttttcaaattgatgtgcctattctaccgtaatgcagtctgttctccttttatagtaattgagactagggttctcacaccaacacctgggccccatctctgtttagcctttccctgtcctttcaatgcaattgcgtatttggctaactcagtactcggtgtttgcattgttattaatatacatgtgttattccctcttcagccaagcagtatatatagttaggtttcacttttacaattcttatttttccgggaattgttatttgccttgttttcatttgttttattatgtactgtgagtttttgccaaatactttaaagacttattaataaattttcaatactcagatgcttcacagttttttactctgttcctctcccctttttttcctggaactctttcctgccacctttcactctttgctgcagtctgcgctggttcctctctgggcctgcagcatagggtgctctttattatgtacacacttccagtcactatcgtagtttttagcccaaggcctcatccccacattctatcacatctgttgcccataaatatccagtcctttaggggttctctgggaaaaataagctcttctttgtcatcaacatatgcactccgtagtactcatgtcttcactttgcccgttctgctgggtaaggtgccacttctctgtttgctttctgtcctctaaatatttgacttcttatttgcttattttcctttctttgtccttttggactcatatcttttttgcccctcactattatttgatagcatttgtgtaggagggcgaagtgggaaggaagaggaggtgtctgtatctgtctgaagattacagaagtctgtaatctgtcttggctgccaggtgtcagttttgagatgtaaatgttgatgatgaggtgaggagaagagcagcagagcatggggtctgccatcctgccttggaccatggcctgctttaggctgcttggtgtatatgatttcatctagctgttcatacctgctttttcctgtgccccagcactgaacatagactcgtaccattgttttgtgtaatctgttaattggttgcactgcagcatatatattttttaactatacaaataagttgcttcccttaaagattcatgctctgatctggaaatggattcattaggtaaaagtcttttaatggaaaatgtgttttgagttccagtgggccaatttatgagcagaatttataatgtgggcatttcctgttttcttcaaaagtaaattgaactagtgtatgaagtttcacttaaattttaaatgccaaggtctttatataagtcctttgtgtttttttaattttgaaatttgtataacttgatttgtttgtgtctaatggaatttagaaataaatttaatatagtttttagggctaacctaaaagtaattgggttcatcatggtgtcatatgtaattaaaacatatagaatcctaaaaactaattaagttccttggacaccttatctcacataacccacatctctaatgtctccccattgggaaaagagtccattgataaatcaggtgaattatgcctagcgggcccaaatctgctacttttctttaagttgtttaggagttacattcagaccatggtgacatggagcaccaagaacttagaatcagatttcattttacttgacaaactcttgaaaggtcactgccacagtctctcttgagtgcaaggctatggctatgctttgtagcacagggacgcgatatttctctgctatctttgggtagcagaggttaacacagctcccttgtgctttctttctctcttttctattttcttttcttttcctaaggatagatctttaaataggaggagtttaaccccatgttaggtgaattcaaatggatcttagcctgatgtctcttgttctcttttggttccagtttggttaattcctttcatccaattttccagtggttgagggagaacctaacttgctctcctcgactctgagcatcatccttcactgacagttcaggcattgtgggtaggaagaagtctgagaacaaaacctagggataaagtttagtagagatggggtttcaccatgttggccaggttggtctcgaactcccgacctcaggtaatccacctgccttggcctcccaaagtgaggctggaaataagacatgctggaattgtaagtaggacactagagtctaggggaatcaaagaggaaaatgaacagaaaagggaaggggaaggatattatttgattgactccaagatgctactgtttgtaagttttaccattttaaaaatatgccattaagaaagaaatgctggccgggcatggtggcttatgcctgtagtcccagcactttgggaggctgaagcggacagatcacctgagactaggaatttgagaccatcctggccaacgtggtgaaaccgcatctctactaaaaatacaaaaatcagctggatatggtggcacatgcctattgtcccagctactcaggaggctgagacattagtactgcttgaactggggaggcaaaggtttcagtgagcagagattgtgccactgcactccagcctgggcaacagagtgagactgtctcaaaaaaaaaaaaaaaaagaaagaaatgctgcttatttaactgtgttctgtcaatgttaaggtgtatcccgacttcagagatgttaacaaatgggaaaaaatttggaattcattaggcatttggaacttacaaagtttcggccgggcatagtggctcatgcctgtaatcactttgggaggccaaggcgggtggattacctaaggtcaggagttcgagaccaatctggccaacatggtgaaaccccatctctactaaaaatacaaaaattagctgggtgtggtggcatgcgcctgtagtcccagctactcaggaggctaaggcaggagaatcgcttgaacccagggggcggaggttgcagagagctgagatcgtgccctgcactccaacttggacaacagagtgagacgccatctcaaaaacaaacaaaccaaaaaaaaaaaaaaaatttcatagttacagaaagtagtatggaggccataccgagattttcgacatggtagtaaaactctgcattatggctctgttctgcatcatctctgttctgcatcgtttcactccacatcagaccctggatagctttggtgtactggtcgatcttgtggcagtaaggctagtgtaattaagaggatattttaaaacttaacatataattgctctagttgttgtctcttttttgctggttaagaaaatcaaatttctatcctatctgaatctcatagcagactttggagatttctgacaagtcatttcttactacctaggggaatgtacttgtactcagctagagtctgagtatcttctacatccagggaattgggctgagtgtggattttggtcttggcagtttttacttttattaatttgcaaaagaatagaagacttggaatgtacaagaagcataaaaatgtgtcaggtggttttacatgcgttatttatcacgttaatatgtcttaagatattttccacgtgtaaacttatgtaaaggcaggaaactagtgagatttcatattctagggatcaagagattgttttagtaactagcctcagaaagtatcttgaaaggtattatataaggtcaaggaactaaatattagtaaagagtcaggccaggcgtggtggcttatgcctgtaatcccagcactttgggaggccaaggcaggcagatcacttgaagtcagcagttcgagaccagcctggccaacatggtgaaaccctgtctttactaaaaatagtagtgtgtggtatggtggcgcatgcctgtaatccagctcctcaggaggctgtggtgggagaatcacttgagcccaggaggcggagattgcagtaagctgagattgcaccactgcactccaacctgggtgacagagctagtgtctgtctcaaaaaaagaaaaaaaaaaaggtcagataggtgcctaaagcctgtgtgtctcgctatgagaatacatctcaagttttactgtggttcattgattcagacatgtagttcacattttaacctgtctgaaatggtaatatgtgaaattgatgtcatgatatagtttaattggcagcatgttttcatagtggtacattttataattagtgaaatcttagatttgatgaaatagatatgattttttaaagtgggaaagtttagtgttatagacagtttgcaggactttttattttgtaggtacttaaattttgaggacttaattattctctaataaagtgattgacaaggattaatgtataaattataccttgtcagtctgaacaatctgcagtttggacattgattcaaattcatttaggctgaataaattttgataaactaagtaagttttgacagctatttaaatattgggaaaggggatattcaacatttttcttacatcctgagagctttgttaaatttagttatttgagacccattgggttctattttctggttcagcatgttgctgtaatggtaaaatacaattttgaaattatagttgtcttgaagttaataataaattgaccaatatgttgtatttttttctctacttagttacaaattgaacttttcctaagtagaacttttaatttgacaggccccctttgcttcctgaggtaactgaaataggccaaattaatgcttttttgaatatcttaggtttgttgctttctttcacatgttacctaccccacttaacaaaagcaattaatctcagcacttgatgccaaagaaaattctaaaaggtctggattttttccttggattttacaaagtagctacaatgggacttttaagacaaagctgcattgctgcttacagagcaatttttgtttaatggtctgtgttagagtcatactgcatgatgacttccaactgtctgggataccattctgaaaagggtttagtgttacatacttcttagagagagttctccatttctaattaaggcacacatctggaggtgctcaagaaaaattagtgcagttagccttggaagtgttatgtgtgactagttcacttcagacatcttttgtataatcagacacatggcattaaatttatttaacttctcttgcttttctctcccacagagtatctcccatattcatgttgcactttgtagaaggcttaccacagaatgacttgcagcactatgcatttcattttgaaggctgtctttatcagataacttctgtaattcagtatcgagcaaataatcattttataacatggattttagatgctgatggtaagtgtttagaggttttcttttaagataattggcatagaaactaaattctagcatgtggggactttttggtttttgttttataaaaaaagacaaactttgtcctgactctttctctctccattctcgcctttgccttctgcccctcctcgcatctattaaaagtgatggttttagtatcctgtctcattttttcctttccttacatcatgtattataggtaaacacatgcgcatgtgtgtatttctcttttagacaaaggatgagattactactgttagctcagtttttttttccctacttaacatctttgcttttattttttagacatatttctaagactattaaacattagacttacgtagcccttctgtcattgtgaaatacatagtttactaacagctaccatcaagataaagcctttatttaaataattaaacttcttagtggaaagctaagtaagcacagtttatggattttgggaatttttgccttgcatttgtctgatatggtaaaatattgagtttgtttttctcataatgttcactttgtcttagacaagataactcaatccccttaaagggttgtatcaagccattgataagggctcactttgatataaccattttctgttatttagacactctttcacacttcctattttcctcctggggatggtttgaatggatgacacaataccatattataaaagcactttacaaactgtaacttatgttataaatgtaattattaccttaaggttttaccctgtttcagatttgagtggaagtagttctttacaatacaaaacaacttattttaactttttttgcatttcaaagaatgatcaatccacttcaggtgcagcatggtttccaaccctgacagcatggaagaatcatttatttagcttctaaaaatgtgcaggctgtaccctagaccagccttggggattaggcccaaatatcaatgttgggtgtttttggtattggtttttggcccgcctacccgcccttccttccttcgttcctctctctcattctctctctctctctctttctctctctccttctttgctccttcattccttctctctctctcttttttttttgagacagcatctcactatattgcccaggctgttctcaaactcctgggctcaagtgatcctcctgcctcagcttcctgagtagctaggactacaggcacatgctatggcaatactgttttaaacattgttttcaaggctccccaggtgattccagtgtgggtcatgtggtagagaaccactgacacaggcaaacaaaggatacataaagttgtctatttaatgggtaggtgcaggtagtagataagagtgtagccacataaaccacatgcttagtgaacggttttgttttgtgtgtatgtgagggattagcatctctgagtatattttgttttcccttttgaaacttatcagagaattcatatgtctgttatgtgactaatgctcacattaaaaaaagttatgtgactttttttaattcatatgtctttttaattcatttattcattcatatgtctgttatgtgactaatgctctcataaaaaaagtaatgctcagtttactttttttatatcagatcatatatatatgtttttttttttgagatggagttttgctcttgttgcccaggctggagtgtattggcgcagtcttgtctcaccaccacgtctgcctcccgggttcaagtgattctcctgcctcatcctcctgagtagccggaatacacgcaggcgctaccatgcccggctaattttgtatttttagtagagacagggtttctccatgttggtcaggttggtcttgaactcccaacctcaggtgacccacccgcctcggcctcccgaagtgctgggattacaggcatgagccaccgcacccggccatatcttatattttaataaatattttaatttggtctgtaaatttttctttttggggaatgtgttttaagtctgtgttgagtcctagacatttgttgttctcagatagtcactagtgataccttaacattaaccagcctgttggcaactaaattggcctgaagtgacaactaaggaaaggtctctttctcctttcttaatctttgcattccttaagattagttctttgtaggaaggctttgaagtctggtggcaagtaccctttatccctcacaatcttaagataaggtctttctgagcattaaaaagtgactgtgggagatatgtcaaatgagttttctgtgtgtgctctgagaaatctttttttcaaaaaaggatagatgtacttgtataaggaaaagagaaactgagcgcactttcaatatttaagtaagtgtctctaacatgttttgcaacataaaatgatgaccactgtgttggtcattacttctctactgctaaaacaatgttttctaaaataatatactccttagaaaaaaatatagtgctttgggtgtgcactgttgtaatccaaggaataggaaatgttttgtagtaagtgcgatggtgtttgacatcgtgatttattaatttatcacatttggtttcatagaaatagagtaagctacgtatttgctgtgccgcaattaccatgacattacacttgtatctatttctgtttcatagatgtgtagatattgatatatacagtggaagtatggattgttttgataagtttctaatgaaagtacagatatttgttgattatttattaagaaaggttgttactcatccaagcccgtggttagcttttcccaaattatcatgtggtagtaagtaaaatgtaaagaaatataccctcccttaaccccacaccacctgttagcacctagccaccttcctttacttctcagccgtactttttgtatttttttgttgtagtggtaaaatataaataacataaaatttaccattttaacatttgtaagtgtacaattcattggcattgaatacattgtgtgcaaccaccatcaccatcaggactttttcatcaacccaaacagaaactactcattaaacaataactccgcatccttccaccccaaagccctggtaaccactattctactttctgtctctgtgaatctgtctattctagatacctcatagaagtggaatcgtacattatttgtccttttgtgtctggcttattttactcagcatattttcaagattcatttgtgttgtgggatgtagcagaatgtcattcctttctaaggctgagtagcattgtatgtattatccatttatctgttacggacatttgactattgtgaataatgctgttgtgaacattggtggacaaggaactgaaagtccctgcttttcattctttttggcataaacctacaagaggaattgctgggtcttaacggtaattctgtgtttaatttttggacgaactgccagactgtttccacagcagttgtactattttacatccccaccagcgttacacaaggattccaatttctctacatccttgccaacatttgctattttctatttttttttaataatatccatcctaatgggtgtctttttttttttttaaaggaatggtttaaacaggttaccttcttactcctcattcatgctttagttgactacataaggacccctctccctattggcaccattgaaattgttcaggcaaaaataactgccagcgacacactgctttaagtaatggacttttcccaagttttgtattaatatttcagtatttggtagtgcatcctactgctagtttttaaactcttcccttgtcatctatcatctcattctctcttgacaaatgtgaaaatggaagctcagaaataaaacaagaattaaaacgaatagtgatccttcaggtaacaagcttcatttatcatgaaaacatatatgtatgaaacattctgttttctgatgttattggataaattaggtgataaccaaattctaagttccaaaaattaaatatactctatctaaggactttaacatggcagacaatggtgacaaggtcaagaacatgttttagagtcttctcctttggtcggtattcaatgatacaacagttgaaaaggccagaagaaagttaacctaggatggtggtttttgaatatctaactttcacttctttcccatcttccaggaagttggctggaatgtgatgacttaaaaggcccatgttctgaaaggcacaagaaatttgaagttcctgcttcagagatacatattgttatttgggaaagaaaaatatcccaagtgacagataaagaagctgcctgccttccacttaaaaagactaatgaccaacacgctctcagtaatgagaaaccagtatctttaacatcgtgttctgtgggtgatgctgcctcagctgaaacagcctcagtaactcaccctaaagatatatcagttgcccctcgtactctttcacaggacacagctgtaactcatggagatcatttactttcaggtccaaaaggtttggttgacaatattttacctctgacacttgaagaaactatccagaaaacagcctcagtttcacagttaaattctgaagctttcctgttagaaaataaacctgtagcagaaaatacaggaattctcaaaaccaatactttgctatcacaagaatcactaatggcttcttcagtatcagctccatgtaatgaaaagcttattcaagaccaatttgtggacataagttttccatcccaagttgtaaatacaaacatgcagtcagtacagctgaatacagaagatactgtaaatactaaatctgtgaataatactgatgctactggtcttatacagggagtgaagtcagtagaaattgagaaggacgctcagttaaaacaattccttacaccaaaaactgaacaattaaaaccagaacgtgtcacatctcaggtatctaatttgaagaaaaaagaaactacagcagattctcaaaccacaacatctaagtcattacagaatcagtctctgaaagaaaatcagaagaagccatttgtgggaagttgggttaaaggcttaataagcaggggtgcttcttttatgccactctgtgtttcagctcataatagaaacactataactgatttacaaccttcagttaaaggggtaaataattttggtggctttaaaactaaaggtataaaccagaaggccagccacgtatccaagaaagctcgtaagagtgcaagtaagcctcctcccatcagtaagccaccagcaggccctccatcgtctaatggcacagctgcccacccacatgctcatgctgcttcagaagttttggaaaagtctggaagcacctcatgtggagctcaactcaaccacagttcttatgggaatggtatttcttcagcaaaccatgaagacttggtggaaggtcagattcataaacttcgtctaaaacttcgtaaaaagctaaaggcagaaaagaagaaattagctgctcttatgtcttccccgcaaagcagaacagttcgaagtgaaaatctagaacaggtgccccaggatgggtctccaaatgattgtgaatcaatagaggacttgttaaatgagctaccatatccaattgatattgccagtgagtctgcatgcaccactgttcctggtgtttccctgtacagtagtcaaactcatgaagaaattttagcggaattattgtctcctacacctgtttcaacagagctgtcagaaaatggggaaggtgactttaggtatttgggaatgggagatagtcatatcccaccaccagtaccaagtgaattcaatgatgtttcccagaacacacatctgagacaggaccataattattgtagccccaccaagaaaaatccatgtgaagttcagccagactctctgacaaataatgcctgcgttagaacattaaacttggagagtccgatgaagactgatattttcgatgagtttttttcctcctcagcattaaatgctttagcaaatgacacattagacctacctcatttcgatgaatatctgtttgagaattattgaattaatgcttgttaacttttttcatataatatttattattattagaagaacttacaatgtgttcaggtagtgtttatacactggacttgtgtaattacttgtgtaataaccatgaacaaaatgcaaggtttaacctttggttctgcccatgaagcatgtaatctttcttacacattaaaatcactgaatgtgttctcctttttggtttcattttgttcttgtgagagtatgaggatttcaaaatgttaaagatgaaaagtggcgtctagtttctgacagtttgtacagttggatgcattacatttttagatttgaagttttggttatgttagtgttatgagtgatctttgtggtggttttcttcccctggaaacctgttgctcgtggcgctttgcccacggtgcccgagttcttgtcctgtgtccagatatgcagacaaatgaagggtgaagaagaagaagaggagctttatttagtgttagaacagctcagaaggagacccacagtgagcagctcccctgtgtcggcgggcaggtcgtccctcaagtgttcagctctcagcagagaaaaggccctggagagggtgactcctctcagctctcagcagagaagcagccctggagaaggtagcttctgttcgcaggcagattgtccagaggtcctgctgctctcagacggggccctggagaggatagcttctatccataggcaggttgttctgccgtctctacaggtctctgaagctcttagcagagagggtagctcctccctgttgctggtcgtcccaccctctgctcagttctggctgagcctggggcattttacgggcctcgggggaggaagtgcatacttactggcctggaaaaggcaccagttcccactcctacaggtgggactggcagcctggccctcagccttcaggccctccctgttcatggcttccaggcttacccccctgctttgatctgagagctggtgccaatagcagggagaagccaagctgcagaggcaagcacttccgagcctgcaaaagcaggcccccaaaagtgcagggatgcctgagtctgcacccgcacccaggagggtggagatcttgcctgctccaaggctgcagccggaatgatagcaggctgactggagcacctgccaccatcattagttcaagagtttatgcagatttaagttgtatacggtatatgaatgtgtgacagttttccttatggttgtgtggccttctgtaagagcctacgcctgtttgttacaccggtagagtgctgtggaatgtaaactttccctatgtcacttatctcctttatctctccatacagaggagggcaagaaaccttgttacttgaactttagtaatgttaagtgatcaataaatctataaataaatgatagcagaaaaaagttacctgtttttgtgatgatgtacaaactttacatgttatcacaaataccatctttcttcccaagacatttacttctgtaaccaaagtgggacaccatctaacagttctgttttgggagagagtaataaccagtgcttgtgaggcttgttagatgttggttgtgatatatgagatagatgttatttcatttagacctcaacattcctgtgcgtgagatacttttatcacatcttacagataaggagactgtactcattcagttgtggagctgagattgagtagagtggctattacagcagttgagtgctgagcttatcaatatatgttccactcctcaggcttcatttaaagtaggatgcccaaacagcaccactgccgtagagatttgagttaacagcagtacttactgaggtttaaggctggcagccagtgtccttgcagtaaaattatttgctagggactcagtacttcataatctatttgtcagatttactcctaagcttctgtgttgttttattttttttctgacaaaagtagtgcatattgtcaaggaaaaactaggaaaataccaaaaaaaaagatttttgaccatgcattttaatacttagtgactacaaacattttcctattttatgcatatagattttaaataaacgtgagatcctattgtatctgttttaatggataaacattgtttcactgttttaagattctgaggtgatttatactgtcttgccattgttaattgcagcagttagccttgttgataaatttttgcatggatccaagttttgttttccaggagtggagttgcttggtcaaaggaaatgcacatttaaggttttttggtgattgcatgactgacttccctgggccctcgccaacactaggtagtagtattgggaggaaggggggaaccaatcctgggtgctccaagattactagtgagcctgaacattttctataactattgtccacttgagttgttgttttgttttttttttggtggaggcgggggtgggtttaagaattgcttatcctttgcttgtactaattatcttttcaacaaatatttctagattactgctaaggaccaagcactgttatcagcctgagataaggcagcacactagaaggaaatccttgctccttttgagtttgccttccaaacatggagatcaatatataatgttaggtagtaataggagatacatgcagttgattcatgtcatttgtagtagttatggtcaataaagttgccttgaacactgaattagtataaactgaaatactgttcctaggggaaataggttcctgctagcctgtggtcatgagatttttgtcaaacaatcactatataaccttttctgtttctgtttaaagacatgttatttgatctatatggttgattctttacattaacatggccaacagcactgtaactcagcctgaacgaagcttatctgacacatggtgttctccataaggcacatcatagctttctgtgcttaggaacactagacggcacttcagcactgcacttgaggacgttttaaacagtgaaatcaacaaaaagcacaaaaaaatgcaacaataggctgggcaaggtggctcacgcctgtaatcccatcacttagggaggccgaggcgggcggatcacgaggtcaggagatcaagaccatcctggctaacacggtgaaaccccgtctctactaaaaatacaaagaattagccgggcgaggtggcaggcgcctgtagtcccagctactcgggaggctgaggcaagagaatggtgtgaacctgggaggcggagcttgaagtgagccgagattgcgccactgcactccagcctgggcgacagagcgagactgcgtctcaaaaaaaaaaaaaaaggaacaataacaaagacactagtcccccaaaaatacacttgtttacagtgtgaactgaaagaggaaggtggagtattgacttgtttgacctcagctggaaatgtgcacgtcctgtgactcaaatttttctctgttctgtgcatgcatgtccacgaataaccacaagaagcactgaaagcattgatttttagggttacaaattaattttagcaagtaaatgaattcacaaatacggaatctgtgagtaatgaggactgattctttttttttttggagatggagtttcactcttgtagcctaggctggagtgcaatggcatgatctcggctcactgcaacctccgcctcccgggttcagcctccacctcccgggttcaagcgattctcctgcctcagcctcccgaatagctgggattacaggcttgcaccaccatgcccggctaatttttgtatttttagtacagacggggtttcaccatgttggccaggctagcctcgaactcctgacctcaggcaatccacccacctcagcctctcaaagtgctgggattacaggcgtgagccaccgcgcccggccgaggactgattcttatgtcagatggcactaaatgctatggagaagaggagtggatgagagggagaagtattttagaccaggtagacttggaaggtttcttggaggtgggtgatgtttgagaagaggcttcaataaagttagggagctcgccatgtgattgcaggaagagcgttccaggagaacaaaagtcatgaagagtgagtgctaggcatgtgtctggtctgtttgggctgctataacaaaataccttagactgggtaaaatgtataaataatagaagtgtattgcttatagttctagaagctgggaagtccaagatcaaggtatcagcacattctggtgaaagctgctctgcttcatggctggttctctcactgtcctcacatggcataagaggggcacagagccctcaaccgtctctccagtggccccatctcttagtactgttggattggggatttagacttcactaattttggggggacacaaacattgagaccacagcagcatgactgaggataagcaagaggccagtgtggttgagcagagtgatcagtgaaggagagttaggacatgagtaaagaggctagcagacaccagatctcatatggctttgtaggccatagtgaggactttgtttaagctgagaataatagataacctcaggaaagtttcaggcaagagggtaacatgatctgatctgggttttaaaaggatcactgaagtggggagactgtctacagatggtctgaataggagtcctagtctattacaatctccttggagtttagggtggtaactggaggtgttcaagagtagttggattactgttggatttcaaaagtagagccaacacgatatgtgcattggctgtgaggtagaagaggagtcaaaatgaactccaggttttattgactgagcaattgtgccatttcctgagatgggtcagatttgggaaggaaagaatttaaaggggataagataatcccattaggagtgtgttaagtgtgagattcctattagactttcgagtggagatgatttaataggaagatagatctgcaacactggagctcagcggagagggacaccctggagatagccgtttgggaattaggaatgtgtggatcatgttataggatggggtcatttagggacttaaaacagctctgaagaacaaaaatggtgccttgatcttggacttcctggtttatagaactgtgagcaatatatatatatttttttcaagacagagtcttgctccgtcatccaggctggagtgcagtcgcaccatctcggctcactgcaacctccacttcctggttcaagcaattctggtgcctaagcctcccaagtggttgggactataggtgtatgacaccatgcccgactaatttttgtatttttttgtagagacagggttttgccatgttggccaggctggtctcaaactcctgacctcaagtgatctgcctgccttggcctcccaaagtgcttggattataggcgtgagccaccatgcccagactaaatttctaacatttataaattatccagtctaagatattttgtgatagcagcccaagcagaccaaggcaaaggccaagcacacttgctcctcctgacttttgctcttcctggaatgttcttcctttagtcacatggttgcctgcctagcttcattcaataggagtgtggtgccctgaaaatacaaggaagaatgcttttcttttttttaaaaggaagggatgattatctgtcagatgctgctgaaaaagagtaatagagtaattggccactggctctggcaatagggaagttagctctgctaactccacatgaacagtttcacatgaacaagtgtgagtgggctcaagagaagggatggtgagaaagtggagctatggactcactcttgaaacattttctggtgcctcgtagggcaatgtgaggtcaaggtttttgttactgttctgaagatgggagaggctgacacatggatgttgtaggtgagagaaggggcgcttgcgggggcaaacttctccagggatgggattccagtgtctaagaggaggcggtgtgaccctaagagctagaaaaattattttattaataggaaagacaaagtacttaggctcagatgctaagagatttgctgataaaagaatgagaacggtctcttctgattattttcttggggaaataaatagatcatcagctgagggtgtgaggggagaaggagttgaacatggaggaagacaggtgtgaaatattggtctcagaatggagagcgaattgaatagggacatgcagtgggcttgctaagctgtgcggagagcccgtgggaagtttatggtcatcaatttaatggcgaccagccaagatggtggtttatttttctccagttgtatttaactgctcaggtgcaggacagagagactaagtgtgaagttaatttcagccaacgtagaggaattgtcaggcagatgggacaaggagatagaggagaaaaggaataaggcttcctgcaagggtaatgattgtagggatggataagtaaggaacacaggaagtggctgtctgctgagtggtggcagagctcagtgggtcagagcaaggttcaaagaatggcagagaggcacttgtggaggaagtaagctggctagaaagtagtgtgcttgaaattaagcttctggagatagcaaggttacaggtgatgacaaagtctgagtatgacaaggaaactgcagggccagagttggcaagaattcatgaaaaatgaggagaaagaggcaccaagaggctgggatagcacatggattgtctctgtgtgaggcaaagtcatctaaatggcagcagtggccctagcagaaagaaatatacagtgagccggagcaaaaatcctcaaggacaggcagaacgccatgaaaacggcagatgacagccaaaggagcaggggcaggggctcagtccaaagtgtttcagagtcactggagggttgagtgggaaggggagggagtggctgaaatggcaacaaggaagaacctctctcatctccaggcccaaaagtatgtggaatgcgggagataagacagccaccactggccagggctgtaaagggacattcagcgaatattcaggttccatttagcacgacagcagggaagggactgttggcagaaaaaaactggggcagtgggattaaagacagaccacacattccaaaaggcaccgtgggagggtcagggggcgaggttaggtctaggcttcagtgtcctgggagactcagtcttcacagggtgacagcgatcaagagtgcagcttaggctgggtgcagtggctcatgcctgtagtcccagcactttgggaggccgagacgggaggattgcttgaagccaggagtttgagaccagtctgaccaacatggcaaaaccccatctctactaaaaatacaaaaatcaactgggcatggtggcgtgtgcctgtagtcccagctacttgagaggctgaggcaagagaatcacttgaacctgggaagcagaggttgcagtgagctgagatcgtgccactgcactccaacctgggcaacagagtgagaccctgtctcaaaaacaacaacaacaaaaaagaaaagagtacaacttatgaaggggtctcctggggagagggtttttgggattctcctgcctctcaaagtgctgggattatgggcgtgagccaccacacccagccgagggaggctgagttctaattgttgtatctctcttgggattggcctcctgggcagtttaaaagacaaggcaaggaatcttttggagaaagagactgggggcaaggtgtgtctgaacaagaagtgtgagaagctctgtgggctcccttcagacttccagtcgttgaattgggatctcatttatatcagctctaggtgtaacgatattaaatcttctctgtcatttggcaattttggtttatgcttgatcatcatttttaatgtttcgacatgtagaagtttaacattattttacattcttttccttctggcatcatgttttagcaagattgtttccaccaaaagaatatatatatcttctaatgaaactacgtttcttttttttttttcctttgctttctcttttggtatatgaatctttgattatttgtaatgtattttgatgtgtaacactgaagtttctattttgtactatttttttccccaaacagtaaacttattgttcaaatacttattgaacaaccttcactattctttaaccatttagaatacgccattcacatatctttcatactacatttaataacattttttaattaaaaaatattctactgatttgtttattttgagaccaggttatgaaactggctaatttttgtatttttgttaaataccgaaattcactgtgttgccaaggctggtctcgaactcctgggctcaagcaatctgcccaccttggcgtctcaaagtgctgggattacaggtgtgagccgctacacccggccacacccggccaacacatattatttgttattacatttaattcccacagtacattgaaattatcagggaaaagttttcagtgaaacattattgaacgccacattaaaagtgtaaattacaaagatttaatgccaatttttcagaagaaaaaagaccaggaggaaggtctatgaagttttagccagtctctcatccacctaccatttcacgatcatgcactgtgtaagtcaggaaaagagtaagaaaagtgaaagatacaattgattagagagttttgctggatactatagatgaaaagaacacaaaatggaacagcctcttcaagcttagagtcaacggctgtagtcccaaagactgtagtcagaggcggtagggccaaaagacatgacttatggcattggaggaagaggatgctttgggagttcatggtagaagaggcggaaaaaatctggtggattaaagaaagcatcccaaagtgacattaaactaatgactaaattctgagctgttttcaggggcaaagcctgtttgggcacccctgccacacttaaagagtcacctaggtatggttcgtgggctctgaacaggcctgctcagtgaacatatttgtgactgtttctccggcccttttagctgtattgagtaaaatttaaagagaccattgttttggcctaagctcctgccctaggcccaaagaacagaccaaacctgaatggcttcacttgtcctaggtgctgtgtactcaaactgaactttgaaacaggtcggtttttcaaaaaaagcaaaagattcacagcaaccaattagaagaggcccggtcaacctgagccagcatgatgaggctcttctgctttaatcctacaaggaaagaaactttgaaatgaccaatctgctttcattcttggtttctgctttctttggtctatttctgcctgtaaaacctatctcctctgctcagctcattgaagtacccttctatttatagatgggatgctgcccgactcatgtatcgctagtaaaagccaattaaattattacactcgatttgttggaattttgctattttgacagcttttcaaaaacaccagtaggttcacatccctaattccccagccagtgttccctcaaggaaccatggaagaagcaaaggtggctgaaaggcgcctcaggatgcttctaagcacggcacatccatgaaaaggcacttactaatatttgcaggatagcaaagcactgcagtgacgataaatctagtattggagaagttcaaaataatcagtagattaacacagaagccagagcttatagggagaaaaggaaccctatgaaatacttcaaatccgaaaacgaacatgcatttcctgtttagttagtgcaggtacgtaaaagcttggtaaagtacccttcttgccagctttctctttcttacaagccttttcactgggctgggaggctgatattatctaaatatgctgaggaggttcaagtatctccacaactcacctcagagtgaatgctcccctcggccttaaggcaatataaaccagccctgtttagcaggatagcaaaatgtttgcggttgtaaactggtgtcccattggctgtggcgcttgtggtgtaaagaatccctgtgcttggtaattaatagagaaattctatattttaaacttcagttgtatattggctcttatccatggcagattttcacgtatgtgttatttttttatttattcagagccggagtctcgctttgtcgcccaggctggagtgcagtggcgcgatcttggctcattgcagcctctgcctcttgggctcaagcaattcttctgcctcagcctccctagtagctgggactacaggtgcatgccaccacgcccggctaattttttgtattttagtagagatggggtttcaccgtgttgctcaggctggtcttgaatttctgagctcaggcaatccgcccgcctcggcctcccaaagtgctgggattataggtgtgagccatcatgctcggccctatgtgatatttattacaatgaattccaatgatcagacctatactcaagtataagtgaatatatcattcaatgaagtataaatgatcattatgttcatattcacacatacaataatgtactcaagtttattgctaaggtaattcagaatctccttattttgaagtgtgcatttgatatacctgtttgggaataactagtttcttatctttgacagaaaataattttgttgttttgtttttactaaaaaagcatggtgaaaaatggctccatttctaagagaggtaactaaaatatcgcaatttgctgggtgtcattaaagtaactcacaagggaaaaaatgcaaattggtatctgctgatggagtaaatctccgcagaagtgatgaccctgaaaggatcaatatattaaagcccctcccagctggtcattccagattgcaacaataaagcattaagtgttaaaacctcaaggcagctttttttttttttttttgtctcaagtcctttattattaattttatagacctacttaattactaagccaaaaaaaatcaaacttgtttctctttgtgacttgtcaatagtattaaactattctggttttttatttttgtgttaccttaaagtctccagtttagtaatttttctgtacctaaacacttcggatttgacatgctttgtggcctttatcagtagttagaatgtaaatccaataaataaagtaaaagccaggtcttcaaaacctgggggccaagaactctgttttagagggcctgtgactctcttggacactggacaaaatctcatctctaaatatggatattttagggagagggtctttaggctgtcatttggattttcacagggctccatgtatccataaggtagtctcttgggaagtttgacttcaataaatgaagtttaacttaaacctaaaatgaaatttaactgaaaaacaaaatccaatgaaagatgctttcttatgcaaaaacaaacaaacaaaaaaaaaacaaaaaaaccccaaaaaacccaaagccaaagattgtttctgaaattaggttctaggttccagagcaactccatggtggggaatcagccacatgtaaagtaagctaagagtttggacaatttgtaatatttattcctaggtttctttaagaccctttcagattttgaattcctattagtagcatcagccaggttctaaatgtaggcatcaccatagacacttccccactgctgcagtccccaacacttgcccaattttcccttgaattgcacccatgctgccttctccaggcctatttgaacccagaacctcgttgtgcctcgtttgaaatataatttcctcctaactagtctctgatctactatttcccctacattgctgccacactaatcacctaaaatagatttcattctaccctgaaacagaaatctctaataagttactcccttcccttacggggtaaagttagccacatcctaggtattcaaggaccttccaggagctaagaacatttcccctgcaccttcttgaagtacacttgtcctatgtactggttatgttcatttcttaccctcgctctcgttttgtctggaattttccttggccttaaatgcctctcacctgcctgcccacatctctcagggttgtttcaaatcctcaatgaaggctcacagccccagtctatgttggccacttacttcgtggcctgggaacatttttctttggctgacttgctgacactccatcagatgcatttttatctggttgtccatctgtgaaccataccctgagaaggcagagagtgcctctgcactgaacatgtgctaggggacaggtctgtgctagaggggcaagcactgggaatgaagaactggtccctactcccaaggagttcatatctcagtggaggtgacaagcaactcactgtttccgggggttgtggtgactgctgggagaaggggtgtctatattagatcgaagcagcatcaggggaggttccctgagaaggtgatgcctcagcggatgtctcccagctaagtggggtggaggtggagaagggcagagcagggagaggatctaggtggggcgtgtaagtctgcatgggtaactcagggaacccttggtaactgcatgtaactgtgtgaagctttcatgaaggaacatggtaggagactagggtatggactatagaagcccttttgctaagctcaagaatttgaggccgggagcggtggctcacgcctgaaatcccagcactttgggaggccaaggcgggcggatcacgaggtcaggagatcgagaccatcctggctaacatggtgaaaccccgtctctactaaaaaaaaagtacaaaaaattagcggggcgtggtggcgggcgcccgtagtcccagctactcagggagctgaggcaggagaatggcatgaacccgggaggcggagcttgcagtgggcggagactgtgccactgcactccagcctgggcaacagtgcaagactccatctgaaaacaacaacaacaacaaaaaatttgaagtgtatcttgaaggaaatcccttggagcctaaaaatgatcattgataacagaaaatgatctctgctctcgcctagggtaatatattcagcttcaaagtggaagggcatgttttccaagggcatgttttctaagtccctgtaattgtagtgatagcaaatatatgccctgcatcttgaaatgtaagactaggtttgaacagtatataaattatcttatgatctaatttcccctcattttgtggtttctactataagctacccagaagtgtagacaggacgtttggaatttgatgggcatcggaaagattcctacctaagaacatttttttttttttttttttttctgagaaggagccttgctctgtcacccaggctggagtgcagtggcacgatctcagcttactgcaacctccacctctcaggttcaagtgattctcctgcctcagcctcctgagtagctgggactacaggtgtgcaccatcatgcctagttaatttttatatttttaataaaggcaggatttcactatgttagccaggctggtcttgaactcctgaccccatgatctgcccaccttggcctcccaaagtgctgggattacaggtgtgagccactgcgcccggcctctaagaaaatttttgagagctacttgttctgttgcctggaattccaccgtaagtacgacgttgtgtctccttctccagggctactaactaaacaacagagggtattgtgttatcgacaattatttgattgataactatcagcaaacatttgccaaggcattcctttaaagatagcctagtgactctattaactactccttcttccaggcttctaagttctgttggaggtaagtagatcccagagataaagcacctaccataggacctgaatcttggtagaaataaattatatcatcatgttatcatattatcatgtgtttttctatctttaaagtcttatgtgaatattctgcttgaaaaatatgtgtcctctgttagaccagagttgaaaatatgttattcaagaacttgtaacaggaacccgcacaatttctgctggagtttaatttcagggttaattctgtcagcaatctaaggtaaacattaacatttttccctagattcaagtccgttgtccaaaagctgtaacagaacttaactgaataaatagtttcttaagatggtaagcttccatatgcttataatgactcctctacacgttttcatctggaaggctgctcatgcttttggaagcaaagaagacaatcttaaataactacatttgctttttggtggtgccagatttttctgagaaacaccaatggaatttataaattcaccagtcaatgggcaattgagttgctgttttgctattaccactgccgtttgtgagcattgttgggaaggtgtcttgaagcacacgtgcaagtttcccttggataagtagtaggaatagaattgccaaaccatggcttccagtgcagacacagtctctcccttgggcccagccactaggcaccacacattaagaggatattgtctgtccatgtcctagaaacgttgtagcatcatgctcctattcgattaaaaatctcattattaaaatgaaccatcgggtaaatgttgtctcgggaaaagaagcactgaccgtccctgggtgggctcgaaccaccaacctttcggttaacagccgaacgcgctaaccgattgcgccacagagacccagttactcaggccgcgctgcggtgtgtacagatttccgcggcgccggcagccgctctagccaccctgggcgtcgccaccccaggcgttgccaccccaggcacgggctgagaagtcgcggggcgcgccgaggaggcagcggaagcggccgaggtgcccagcggccgccgcggggggagaggctgtgccccggcgcgcgggagggggcgggcgaggccgcgtgactccgggcttctctggggacgaagcgcgcccctcgtggcggcagcggccagtggtccgcagtcggcccggactcggggtaggaaagatcctctcagcaatggctgcgcgccatgcgtgctctgcggcggggaccgtgccggccgggcgcgccaccagtaaccagggacccaggggagaacctgccaaggggaataggtcgcacggagagaatacgacacgcttggagggaagaaccacgtgctgtacaggtttaaaggatggagagtcacgtgcgcttaggtcccaaacttaagggacctaaccctttttctgggttgccgctattgccccttctccttagacagtttttcatctcatcacctctcaccccgtaaaatgcaacgaacatagataggctgtgtatcaatgtagactgtatgtatatctgtgcttcgtacataaaaagaatatgatttttgccaccttctaagaaccaatttgcaccccattttgaggcatatggcctctgttgagattgcatagtttaggggacatcaaaaaagccttatagagggactggcaattaagatagcctttcagtttgaaatggccattgaaggcttctccctttccctgacttctgaattttttttttttttttttttttttttttttgagatggagtcttgccctgttgctggagtgcaatggcgcgatctcggctcactgcaacctccgcctcccgggttcaagcgattcctgcctcagcctcccgagtagctgggaatacaggcgcctgccaccacgcccagctaacttttgtatttttagtagaggcggggtttcgccatgctggccaggctggtctggtactcctgacctcgtgatccgcccgcctccgcctcccaaagtgctgggatgacattacaggcgtgagccaccgtgcccggccaatttttttaggcgcactgttcagtggcactaagtacattcacattgttatgcaactatcaccgccatccatttccagaaccttttcatcttccgaaacagaagctccctacccattacacggtaactcacgattcccctcctctagtcggaacaatcaccattctactttctgtccctttgaatttgactactcttagagacctcatgtaaatggagtcatacggtgtttgcctgtggctggcttatttcacttaccatatgtcttcaaggtccatccacgttgtagcctgtgtcaggatttccttcctggataaggctgaataagctgcactgtatgcaggtatcgcattttgcttttccattcatctctccgtgaacattagggttgcttccacctgcagctatgaacatgggtctacaaataactgattccctgctttcaattcttttgggaatatacccagagatggagtagctggatcacatggtttgctattggctgtaccattttacattcgcaccaacagtgtacaagagtccctatttctcctcatctattttttttttaaataatgggcatcctaatgggtatgaagtatcatctcattgtggttttgctctgcatttctctaacgattagtggtgttgggcatcttttccagacaccaccaatctgaattctatggcccttcgtttactcacttcctcccagcaagagccatttctgcttcagcaaggaggaagctgcgactgatagagggaaagggcccagggggcttgcagagtggggcctgtgccatgcaaggagaggagaagaaggtggatctttgagtaggactatctggagatcctgctttcacaaggtccttgcttgtgtgctgggcagcttttggagctagttatctttattttagcccttgagggatatttaggcatgtggtgcttgtgagcagccaatccatgaagaaggaactgatggtctccaccttggaaatattggaagagataatgccgtccaaattgcagttttagaagttaacttaaaattatgctattttaatggaattttgggtgcatttccattttcttcttaagaattgctggaatttcttaagtgtttaggtgatgatctctttttgtgattccttttttaaaaaacaacaacaaaatctttcaaatacataagaaataggccgggcacggtggcgtaatcccaccactttgggaggccgaggagggcggatcatgaggtcaggagatcaagaccatcccggctaacacggtgaaaccccgtctctactaaaaaatacaaaaaattagccgggcgtggtggcgggcgcctgtagtcccagctactcgggaggctgaggcaggagaatggcatgaacccgggaggcgaagcttgcagtgagcctagatcgcaccactgtactttagcctgggcgatggagcaagactgtctcaaaaaaaaaaaaaagaaaaaaaaagaaagaaatagacctttatttttctgtaactccacaaaatttctattttgattccctattattttgctattgtcaacacagtctcagtcaattcaagatcctgtttgtgcctttccctggagtcatttccaagtgctaaggctttggtccatgagtcgcatgtgcacactcatggctgtagagggagttttgctcccggtgaaggtcttggtggctcttctataccttgattgagggaaaggaatcttatgtgaagttagctttgttgtatcagatattccataaagccatttctgggacagtcccctctgtttatcggaccacaagcttctctgtcctcatcaagcccacctttatacttcatttctccagacttcatgtccagactgtgggatgaacaagtggttataaggttttagaggctcctgtaggactagatggaaggcaaaaaaaggaaataacctttaagcatgctctcgattccttaaatcccatctgaaagtcttaaggatgtcttctcagtcatacttatttgacaatattacctaattttctccattagcccaagctcaggggtctttcttcttccatattcacatgggtgcaatggttttctgaaaggaaaacagcattactagggcagtaacatttaattaatcacaggtacttatcaaactacaaaacaggcattccaggaactgggtgtttctgtttgtaaaattacactctcgtgtacatgctcccactaaaatgtaagttcgctgaggatggaggttttggtctctttgctctgtgctgtaaccccaacactgcagcagggcctggcacatagcaggcatgcagggactatgcactgaatcaatgaggaaatgaaaaccaggaccatgaagtaaactggacaaaataaaatgtgatagaaaatctaaattcctaatacataaggagcacttatcaattgatatttacaaaatctttttacaattcaattaaagacaacataaaacaaataagaatggggacaggaacagaaaattcccccaaagaaaaaaatatatatacatggtacagccattgtggaaagcagtatggagttctcaaaaatattaaaatagaactatcatataatccagcaatcccatccctgggtatatatctaaaggaaatgaaatcagtaccccaaagaggtgtctgcactcccatgtttattgcagcattagttacaacagccaagatatggaatcaacccatcagcagatgaaaggataaaggacatgtgatacatatacacaatggagtagtattcagccttaaaaaagaagaaaatcctgtcatttgcaacaacatggatgagcctagagaacatactaaatgaaataagccaggcatagaaagacaaatgctgcatagtctcacttaggtgtggaatctaaaaaagtcaaattaaaaaaaaatgtcaagcagagaatagaatggtagttgccagggactctgggaagtagcaggggtgggggtggaggggaggggatgggcagaagttggtcaaaaggtacaaagtttcaggtagacaggtgtaagttctggggatctattgtacagcgtggtgactgtagttaatactgtattgtgtacttaaaaattgctcaccaaaaatgttctcaccaaaaaaatgatgtttggatatgttaaacagtttgatttaatcattttgacgtgtgtgtgtgtgtgtgtgtgtgtgtgtgtgtgtatacatcaaaacatcacattatataccatatacaattaatatatacaatttttgtcaaagaaaaaatgcacatgaccaatatgataaaagtttagtctcactagtaataaaaatcaaaattaaatgaaataaaaatttctttccccaaatcgcaaaagagaaagaaaggtaatactaaaacacagtcacggtgtagtgagagggctgctctcacacaggactgatgagaataaaattggagagcagtgtggtaatatacatattaaacaatgtatataccctctcattttagaaattctatattagaaatccatcctaagaaaataaccagggatgtgatcaaaattttgaatgcagcagcacagtattatttataatagttataaataagaaacaacctgaatgtccagcaacaggcaaaaatgataaataaattgtggcatatttaagctggtggctcatgcctgtaatcccagcactttgggaggctgaggcaggaggatctcttgaggccaggagtttgaaacctgtctgggcaacataacgagacccagtctctacaacatattttttaaaattaggtggggcatggtaactcatgcctgtaatcccagcactttgggaggctgaggtgagcagatcacctgaggtgaggagtttgaaactagcctggccaacatggtgtaacaccatctctacaaaaaatacaaaaattagccagggtggggtgcgttcctgtagtcccagctactcggcagactgaggtaggagaatcacttgaacccgggattcggaggttgcattgagctgatatcatgccactgcactccagcctgggtgagaccctgtctcaaaaaaaaaaaaaaaagaaaaagaaaaaattagctgggcgtggtgctgtacgcctgtagtcccagctattccggaagctgaagcggggggattgcttgagcccaggaatttaaggctgcagtgagctatgattgtgccactccgctccagcctgagtgagaaagcaagactctgtctcttaaaaaaaaaaaagtgatatatttttaaaatagagtatattacttatatagacatcaaaaacaatattttcaagggatatttaaaaacataggatcatgacaaaatgtaaagttcaaaggtaagatggagaatggagaactgtggggaactgtataatctgacaattcgtagttgcatacatctttctgtgtgctggtgctgttagaacactttgtacgcatcacctcatttaagttcagcatccctaggtggcagatactattattatattccagttttgtttcacgttgtatatgcggtgtgagccccaatatgggatgtgtgtgtgcacatgtgcagtatttggaaagttctatgaaatattattagtggttatctctgggaggtgatttttattccttttccagtatgttctcaagcatttgctgcaagcagtcttttgcggggccagggttgagaggcagcagcagtttccctaaattacagatagagggaggtaggtggttatgcttggccagatctctgtctaggggtagaggagtgcctgtgtgtgggtagggacaccggcggggggctttgccaaacacagtggaactgtcacgctggtctctcttctcaactctttcactcacctgagaaaagggtgtctatggaccatgcacacttctgtggggaattttacaagatgtgaatcatcagtgatgaagatgctttcatttaaaaagaattggagtacctgagattagagataacttctacccttttaaaatatttttaaaaatttctttgcactgattttttttcttcgtttttatgagttgttttcatttgggtgggataactcaatctacaggagaatattaagactttttaaattttaaaaaatatactttcaaatacttaatacattttgtgttaaatgacagccagcagatattgactgaattgggctagatgcttcagggatctcccttccatttaagactctccgagaggccattcctgactgcaggtcactgtattatttttaattttaaaatttttacttacttattttatttaattttattttttgagacagagtctcactctgtcgcccaggttggagtgcagtggcacaatctcagctcactgcaacctccacctcccgggctcaagcgattctcctgcctcagcctcctgactagctggggttacaggtgcaggccaccacaccccgttaatttttgtatatttagtggagtcagggattcgccatgttggccaggctagtctcaaactcctgacctcaagcgatccttccacctcagcctcccaaaatgctgggattacaggcctgagccaccccactcggcctactttattaatccacttgcagaaacaggatatacacaaaaacgtttcaaggctgtaagtgccactgcatggcaccaatggtaaacgttttacaaatttgagtcaggaacaatcattagtgtcactagcaacaaaaatcaaaattaaatgaaataaaaaatttctttccccaaatggcaaaggagaaagaaaggtaatactaacacgcagtcagggtgtagtgagagggccgctctcacacaggactggtaagtacagagccatggagtaagcaggtcttgagctgacactggagaggatccttttttttttttatttttatttttttagagtcagggtcttgcttttttacccaggctggagtacagtggtgccatcatagctcactgcagcttcaaactcctgggctcaagagatcctcctgcctcagcatccccagtagcagggaccacaagtgagaggatcctttagtgttgtcaaggagaaggaacagaggtgtggatgggtgggcacagacacaggagcacagctgaagcagaggattacaaagggtggagcctgatgtaaagaaacctaataggtgacagagcatggaggctcttgaataccaggctggaaactgcattaggaacggtgctcataattgcagaaaattttacatggcctagatagtcatcaaaggatgatgtacaaacaactatggcatatttatacaatgtgccgacaggatgcactgaacattttgaacaacaaagagacttgataatggcgaggttttgaggaggtgaatcaggatgcaaaaaaagcaaacaactaataaagttgattgatgacaaacactatcaaaaggcagccaggagaaaagctactggttacctccagggagctggtgagggaggctgggtgggaggatctacccttctgaattctgagggcacctccagtgtggccctcagaaagcaggagcttccaggctagaatcagatcccgacatccctgttaattccacggattccacaccgagtcagatttatgatttactatagggttttaaaaaccaaattgcagggatgctagcctatcacagcttatctcagacattgtccactaaggtatacagagtgctgcctgttcctttggtaccctaatcaggaaaccccatcagatctgctccttcctatggggtagtgagtaacacgaaggcttaccatctcacacagataactggtcataggtccagcagaagtttaaaacagaaaatgaggaaagccatgtgattaactgctgccagactgtttgtgttacaaacagcagttccttaggcattgcctgggacatgcaataatttctgttacacaatctgtggtagttaaaatgctgcacgatgaaagctatctgatttggattcattattaggtgagccatctcgtctgcaatttggttccaccattttcatttaacaaatgtaaaaaagtttattaagctcttacaaagttatgctgggcaaatatgcaaaagtccagatcacctaccgcaggaactaatctagcctcctctctgggcaccctgttgtttggggctgggcagttctttcctgtgtagaaccatctagggctgaataggtcattctgacacctgggcacctctgcctgctcgtaaatgggacaatcagaaagggcccttatgtttccaaactttctttaaagtagctgttctgaaaacatggtccagggacccctgattgtccctgagacctttgaggggatcttcaaggttaaaattaatgtcataataatactaatatgttatctgtcttttttcactctcactttctcacacgtgaacagtggcattttccaggtgacagagtgtgtgataatgaacctaactgaatgcagaagcaaacatgagaacctagttttttcaatcaaaccagacgtgaaagagatttgcaaaaatgaaaaaacaatgctatcctcctcacaatatttttgttttagaaaataaagttatttttcctagaaatgtttttgagtttatcagtcataggtttattattataattaaaaaatgaaatatacatacacagacatattttttaaagttctcagttttaatctctttttttttttttttttttttgagacggagtctcgctctgtcgcccaggttggagtgcagtggtgcgatctcagctcactgcaagctccgcctccctggttcgcgccattctcctgcctcagcctcccgagtagctgggactacaggcacccgccaccgcgcccggctaattttttgtatttttagtagagacggtgtttcaccatgttagccaggatggtctcgatctcctgacctcgtgatctgcccacctcggcctcccaaagtgctgggattacaggcgtgaaccaccacgcccggtctcagttttaatttctaatacagtaagtattgatcagtgtgccccacattagtaaaagctcttggggtcctcagtacttctttttaagagttgtcaaggagtcctgtgaccaaaaataggagagccactgccctagaaggacagccccagcccgggtcaggaacaactgggacagaacctactgctcctagtggattgtaatatgataggatttaaccttcaaggtttcaactcttggcaagagtccatgaggggccatggtttgtcctgagcattgcttactgttaacaggagcaagttccttaggctggtgagccaagccagcctgacgctggccatggacatcttagtgggctgcttgttctagtgtgggttttcattttatgggaaatgtcatctgctctaaggctcttctcatttggggaaatcacaagttctcagaatgtttgtctctcttggttggggcctctataattaaattataaaacagaggtaatggttaagtaatgcaagatttgacagaaaccacagaggatttagggtttaatttgagtgaggcaaaggggggatgaagatgagcggtcctggagacaagaaaaagattggatgaagctgggcacggtggctcacgcctgtaatcccagtactttgggaggccaaggtgggcagatcacttgaggccaggagtttgagaccagcctggctaacataatgcaaccccgtctctactaaaaatacaaaaattagccaggcgtgttggtgtgtgcctgtagtcacagctacttgggaggctgaggcatgagaatcgcttgaatccgggaggcagaggttgcagtgagcagagatcatgccactgcactccagcctaggcaacagggtgagactctgtcttctttttttttgagacggagtctgtcgcccaggctggagtgcagtggcatgatctctgctcactgcaagctccgcctcccagcttcaagcgagtctcctgcctcagcctcccgagtagctgggattacaggcatgtgccaccacacccagctaatttttatatttttagtagagacggggtttcaccatgttggtcaggctggtctcaaactcctgacctcgtgatctgcccgccgcggcctcccaaagtgctgggattacaggtgtgagccaccatacctggctgagactctgtctttaaaaaaaaaagagagagagggagagaaagattggatgaaacaacagagtggggaggacctgtgagcttggtagcttggtgaaggcagggctttattgggggccttagaggggatccaataaaggttcccagtcatggtagtgacctaaagaaaatagcattttaacatctttcatttcataatagacagtcacagtttacaagaccctttccatacattccttatgacatccatactacagcccagaggcaagttgtgcactctctcctctcacaaatacaaaaactcagcctctagaggccagcgacctgctcagggtgatgtgcaattcagggatgacagagtcgaggctcccagcccagtggttatccctcacaggcacgttgcctgtcagtgtgcagtataaaactttgtacaagaaatcaagttgcattagtcagtcggattccccaaatgatcacattgtagatggtgtatgctgtgggcagagcaagggctgctgtttcttgggcaaaacaatcagtccccctcccccccaaaataaatgaatgccaatggtgtgactttattttatttattttatttttattattatttgtgagacagagtctcactctttcacccaggctggagtgcaatggcatggtctcggctcactgcaacctctgcctcctgggttcaagcgattctcccgcctcaccctcccgagtagctgggactacaagtgcatgccactgcacccggctaatttttgtattttttttaagtagagacagggtttcactatgttggtcaggctggtcttgaactcctgacctcatgatccacctgcctcagcctcccaaagtgctgggattacaggcatgagccaccgcgcccagcaatgtgactttataattacagaatgtaggactcagctcccactattgttatgactcaatattctcttagataatgtttggggcactagcttacaggcagcattgcccggtggttaatgttgtagctttgcaggcagactgaccatattaaaattcgatcacaccatttgctaagcctgtggactcgggcacgcttctttctctgcgttagtttcctcctctgtaaaacacggatgatgctataaacacacccaagtcctagaattgttatatgagttagaaaagataggcaaatacaactctcacaagacagcctggcctccagtaagtgccactgagtgtttgctcttattgtacagtggctccaagtgcttctgtcttggattatttctgaccaggtggctatgtctcctagtaacttaccaatcctgttgagtcttaataagcacgtctttgatgcctacagtgcgactgaatttccaggcctcattactggagacacaatcatcctatatgcttttttccatttgtttttaataaagtggtacatgtgtatggcaccagatcaaacagtacagaacaagttacaatggaagagaatggcctcccagctttcctgaaatcctcaactcagagacaacttttttttttctgacggtttctttatacagccctttttgtggttaccttcctaactctagaaaaactattcttacctctgtttatttacttagaaacattagacgttacctttcaactcctcagtatgaagctttagttttcagcaccccaggccaccaccctctttccaggacttactacttatactggtggtaggtggaattttaaaattcatcagcattcttttgtgattctctgtgtgttccagttttacagcaacccgtacttgttgcatgagtacagtagaactgggaggctcataacttagcctgcaggacttttcacttaaagcctggccctcagggtgatgtcacccacctcattgtgcctggctcaggagtttagtccctcagttgcctggttgtatagtttggatgttcagcacctccaaatctcacattgaaatgtgatctccaatgttggatgtggggcctggtgggaggtgtctgggtcatcaggtgggtccctcttgaatggcttggtgccttccccatcgtaacgagtgagttcttgctctggcagttcacacaagagctggctttttaaaggagcctggcaccttccgctctttctcttgctcttcctcttcccttcctttgtcactaaaagcttcctgagccctcaccagaagcggtgcagatgctggtgccatgcttggacctcctgtagaactgtgagccaaataaactctttcctataaattacccagtttcaggtattcctttatacaatgcaaaacagactcacacatctggtaaaccccagttgtttgcttctaggtaagacgggaggagtggggagctggtgagggtttccactgcattgtctattttcaggcaaggtgtctccactgagtaggcttcacattcagagctctgggtaaggtgggcaggaagagggttgcaggctgcccaaaggagggagagaagaaggctgaatccttcagtgacaacctgtgaaccagagtcttagctctctttgaatattttgttcagtatctttgggttttgttttattttgcctaggggtaaatgctgactgcctgttctctggacaggaatggagaagatggtgctagcagggttgctgttcatatgtagacattcatgcagtcactctcttttcagcacacttcttacttctgccctgggttcagttgctgactctgagcccagaaaccttctagggttctgttaggtagattggcttccaccgtctttgcgacaaccacagaaaattctagactgttttctcttcgggcttcattagtcaacttgcttcagtctgtcttgcatcttctaaatatttatagatctctctcttttgttggagtggcagaaaatgctagttgaccacccaatattcaaattatcctgcctccttaataacagaatatcattggatgtggtgggtaaataatataccctaactttccttgcagagaggggtggccaatgagatggaaatgaaagtcattgggaaagactcccaagacatctctttaaacaagacagactgaagcaagttgactaatgaagcccaaagctagcagttgtttttgtttatctttgcctctttcttcttcttcctgtggggacaaagggcagtgatatctggagctgcagcagccattttggcataatgttggaaaagccaagagactctcagagaccgcagctccagcagttttttattttttccaaatatttgctccactgcaggaggatgagatattcgtgtttgttgccttgtgactgtaggaggactgcacttccctgccttgttgtcaagtttccccatgtggtctgctttggccagtaaaacatgagtgggagaagcttggtgaaccattgcatgtctaccagcttttttgctctcttccctttggcattagaaaggcatgtccaggatggagttgttccttcagcctagattgggttatgagaagctagctgggggagtccagtaacatataaagcgagttagaaataaaactttgttgttgtaagctatatatatatatatatatatatatatatatatatatatatatataatatgtatgtaatatataaatacatattatactttaagttctagggtacatttgcacaatgtgcaggtttattacataggtatacatgtgccatgttggtttgctgcacccatcaactgctcatttacattaggtatttctcctaatgctatccctccccagccccccacccctcaacaagccctagtgtgtgatgttccccttcctgtgtccaagtgttctcattgttcaattcccacctatgagtgagaacatgtggtgtttggttttctgtccttgtgatagtttgctgagaataatggtttccagcttcattcgtgtccctgcaaaggacatgaactcatccttttttatggctgcatggtattccatggtgtatatgtgccacattttcttaatctagtctatcattgatggacatttgggttggttccaagtatttgctattgtgaatagtgccgcaataaacatatgtgtgcatgtgtctttatagtagcatgatttataattctttggatatatacccagtaatgggatcactgggttaagtggtatttcaagttctagatccttgaggagtcgccacactgtcttccacagtggttgaactaatttacactcccaccatcagtgtaaaagcattcctattcctatgtctccacatcctctccagaatctgttgtttcctgactttttaatgattgccattctaattggcctgagatggtacctcattatggttttgatttgcatttctctgatgaccagtgatgatgagcattttttcatgtgtctgttggctgcataaatgtcttcttttgagtagtgtctgttcatattgtttgcccattttttgatggggttgtttgttttttttcttgtaaatttgtttcagttctttgtagattctggatattagccctttgtcagatgggtaggttgcaaaaattatctcccattctgtaggttgcctgttcactctgatgatagtttcttttgctgtgcagaagctctttagtttaattagatcccatttatctattttggcttttgttgccattgcttttggtgttttagacatgaagtccttgcccatacctatgtcctgaatggtatcgcctaggttttcttctagggtttttatggtttttaggtctaacatttaagtctttaatccatcttgaattaatttttgtataaggtgtaaggatggtttccagtttcagctttctacatatggctggccagttttcccagcaccatttattaaatagggaatcgtttccccatttcttgagctacagatattttgagtttggttaccacagtattatctagtggaagttgacttatacagtatgtaataggataaatataggtgtgtaacagaatattaagtgttcgtgtttcaaagctgaggggaaaatgttaaaagtgttcacacactctaaaaagagattagctaaaactgcttcattaaccacactttggggaaaccagttctgagattcttctccattactctgacaggttggaccctctggggagcagatctcaagatcaagttatgagtgcaagaggtgtgttgggaagcgatggttgtaaaagaatcctgcagtagcaccaggcacaagtctgtccagggagaggaggacttctactctctaccagcatctctcctaagtccccttaggggacgggggcaaggaagtgctgggaagggcagggcatggttcctggctaggactccacccccctggggcctgtacccacggacctaggtgaagacaggcactcctgccttctcgcccaacggttgcgtttcccaagatcatcctggcctgccacgcccccatctacctattaaactcccccaccttccccaaaccctagcaggcagacacacatcggtggaagaagacaggagcggctggacattgaaaggacgtcgagaggagcacacctgcacaccatcgaccagcggaacgaggcagagtgtggctggagcagtcggagggaagcctgggccgctgactccaggggaaaaccatctcctttctggctcccccctctgctgggagatactttcactgaataaaaccttgcactcattctccaagcccacctgtgatccgattcttcctgtacaccaaggcaagaacctgggatacagaaagccctctgtccttgtgataaggtagagggtctaactgagctggttaacacaagctgcctatagacagcgaaactgaaagagcacacaatagcacacactcattggggcttcaggagctgtaaatatccacccctagacgctgccatggggcgggagccccacagcctgcccgtctagaggtttgagcagcgggacactgaagaagagagccacaccctcatcgcacgtcctgcgagggagacaagggaacttttccggtttcacttctgcttggcttgagctggcactgaagcacccttttccctcctcactgagggagcagaggggaaaagcggtagaactaacaggctaacaatgctcctccgaaaatatatcgtatttttggatccctagagataggtgatcacggcagccgcggagtgcatttgggtctcctttcaagaaagaacttgctgctcagcgttgaagaatgcagttggccaacagcctccagctgctctgtcttcagcatctgccatggcatctgagctgaggtcatgttcttcctgggaggtccccagcagaaggatcacgtggaagctccacaagctccacagatgttccaggagaggaataggcagcatttggaagacatatcctgccataacagagggcatttgctagtagagacaacaaacagcaacagccaagtaaacaaacacacaagcacaaagcactttctcccatttcccctcattgatcctgtccgggtagaagctggggaggaagtagaatagggtgaggcggggtggggctggggggcctacaccttcttccttcccccgcaggtcctgtccctgggccaggcttgaactaggggaatgggaaaagctgtgaagtgaatgagaattaggagtttttatttagactggacttgaatttttttttttttttttttttttttgagacagagcctcgctctgtcacccaggctggagtcccgtggcgccatcttggctcactacagcctctgcctcccgggttcaagcgatcctcccaccacagtctcctgagtagccgggattacaggtgcctgccaccatgcccagctatttttttttttttttgtatttttagtagagacagggcgtcaccgtgttggccaggctggtctcgaactcctggcctcaagtgatctgtccgcctcggcctccccaagtgctaggattataggagtgagccaccacgcctggcctggacttgaatttttaattcctaaaaatgaactaccagttaaaatttaaaaatgaccaaaaaagctatgggatatgctgatgttttgctttggggataaggaaaagatatctggttgagcggcattgaaaacagtgtagggagagaaaaactcattcctggctcacccttttgagtcccactatctcaataatctgatgttatatgacacacacacacacacacggaggaatcctggaagactccatatcaaggtggtgatgaaggtgaccagtgggtgataggattataggtgtgtgtttatttatttattttaattacctttttttagagacagggtctctgtcatccaggctgcagtgcagtggtgtgatcatggctcactgcagtcttgcactccagggctcaatcctcctgcctcagtctcctgagtagctggagctgcagtcatgcaccaacgtgcccaactaatttactttattttattttttattttttgttaagatggaatctcactttattgcctaggctggtcttaaactcctggtttcaagcattcctcctacctcagcctctcaaagtgctggaattactgcacttggccctattatatttttaaaaaatttcaatagttttaggggtaaaagtggctttggttacatagatgaattgtatagtgatgaagtctggatttttagtgtacccatcacccaaatagtgtacattgtacccaatgagtagtttttcattcctcacccccacactgtccccacttctgagtctcctgatgtccattatagcaccctgcttttgcgcacttagagcttacctcccacttagaagtgagaacatgtggtagttggttttcccttcctgagttacttcacttaggtcagtggcctccaatttcatctgagttgctgcacataacatgatttcattctttttttgactgagtagtagtccatctctctctctcacacacacacatacacacacacacacacacacacacacacacacatttatccactcatccattgatgggcacttaggttgcttctatatctttgcaattgtgaattgtgctccaataaacatacatgtgcaagtgctgttttttctcccttttatccttcttttcttccctatgcttccataggtactgagaaagagtcttttttatataattatttcttttcctttgggaagatacccagtagtgggatggcttgatccaatggtagatctgtttttagttctttgagaaatctccatattatctccatattgttttccatagagattgtactaatttacattcccaccaacaatgtatgtgttccattttcactgcatcggcaccaacaacggttgttttttgactttttaataatggccattctggctggggtaaggtggtatctcactgtggttttaacttgtatttccctgataattagtgatgttgagcatttaagaaatatatttgttggccatttgtatatcttcttttaagaaatatctcttgaagttgtttgcccactttttaatgtgattatttgtttttttttcttgctgatttgtttgagttccttgtagcttctgaatattagtcctttgtcagaggtatagtttgcaaatactttctcccattctgtaggttgtctctttactctgttggttatttcttttgctatgcagaagctttttagaataattaggtcccatttacttatttctgttattttgttgcatttgtttttggggtgttagtcacaaattctttgcctagaccaatgtccagaagagtttttcctaggttttcttctagaatttttatggtttcaggtcttagatttatgtctttaatccatcttgaattaatttttgtatatggtgagagataggaacccggtttcattcttttacactacatgtggctatccaattttcccagcactgtttattgaataggatttcctttccccagtgtatgtttttgtttgtttggctgaagatcagttggttgtaggtatttggttttatttctgggttctctatgctattctacttttataccggttccatgctgttttgattacaatagcctcgtagtataatttgaagttgggtaatgtgatgcctccagatttgctctttttttgcttaggattgctttggctatttggacccctctttggtctcatataaattttaggattggtttttctaattctgtgaaaaatgacattggtattttgataagggttgcactgaatctgtggattgctttgggtagtatagtcatttttacaatattgattcttctaatccataagcatggtatgtttctccatttgcttgtgtcatctattatttctttcattagtgttttgtaattctccttgtaggggtctttcacctccttggttaagtatattcctatgtattttatttttattttttgcagctattgtaaatgggattgagttcttgatttgattttgagcttggccatcattggtgtatagcagtgctagtgatttgtgtacattgattttgtaacctaacactactaaattcacttatcaaatctgggagatttttgaggattccttaggattttctaggtatgagatcatatcattggtagaggtagtttgagtttctcttttccagtttggatgccctttatttctttctcttgcctgattgctctgactagggcttctagtactatgttgaatagaaatggtgaaaagtgggcatccttgtctcattctaatttttagggggaaatgctttcaacttttccccattcattttgatgttggctgtgagtttgtcatagatgattcttactattttgagatatattcatttgatgcctagtttgttgagggattttatcataaaaggaggctggattttattgaatgctttttctgcatctattaaaatgattacgtttttcatttttaattctgtttatgtcatgaatcacatttattgacttatgtttatttgttgcttacatctactttctaattttactataataaacatgtataattttgttatcagaaaagtaaatgtaaaagtgagttttaattttaaaacttgggcctaagtcttcctgcctcccaagcccattcccttcctgatatctggggcttccctcctcaagcctgctctgcaggataaggggatacagtccacatgcctgctgctggtttggcccatgataacctccatgggcaatgtctgagcctctgctgttgagttttgctttacacactcctggcaaggaaaggatggccaacatggcttggacatgggttgctgataattggtgatgtctcatgactggttctgcctggagggcttgctgtaagtccctgataggaggaacatggacctgcacaagagcagaacttatctgacactgaagaggacacttcaagaacagattatcaaagtctagctcagggagaaatatactttagagcagaatgaggaatggcgaggcagctgagcttagacacaagcagaaggaaatccatggtgagggcacaggcaaggaaaggggctgagagagcattagtgggggcagtcaggggcagtggtcaggatgctcggatgccagcgtgaacaatcgcatcaagattaaacaccatgaggatcgttagacttcctgtcatatgtctccaggtggtgctccaaatatcctaaaccagatgacagcacccctccaccctctgctgtataagcacatctgctctcctataatcattcccacatagcaatttatcatttttattgatttttcttcatttaatacacgtataagtgtgtcttttatttttaaaaatttgcattcctttaattgctttggagattgtgcatttttctctctgttgatttactctgccaataaacatgtaatcctaccataagcatgttttacttgtgtaatcaaccaaaataaaaaatttaaaaaggaatcactgactatgaattagacatgtggataggcaccagggttgcagacatggcccacgttcttgcattaacttgcactgtggctggggcattggatgggtacattaaaaggattaaagtaatataaggcagtatttattaagtgttgagtgagcactacagaacccaagtgctgagggagtttcatgcaggaagagatcaagagtaacacagagaagaagaatagatcaatttagcgcattcatttaaaaattcaccttttgcataaggggatgtgtcttttgtggggaggaggggagttccgattggcagtttgttctcagggagcttgaagaagagatcttggagaggagacgcagagaaaacaaatgaagaaaatgtcaaaatggaaggggttggcccggctatgcataccttagttagcttaggtagagtctaaacttttacaagtggtttcaataggtgtgtttggtctgggttctttgggaggtatcataggagaatgaaggcagggaggacgcttccagcaccaaaattcaaagggaaatgtattttacatgcatagcattgttttactctctttccatttggagcatatcttaaaaattccatttggagcatatcttaaaaaacccatttctctgacaatggttctaaaagggggaaacatcctttgcaacagaatcattcattctctcattcatcaaccactgattgtgtactaagtgtcagacctgatctccatcctgcctggtatggcactagcttctgtcttgagacaagcattgtgataaaccatgaccaaaaaaagggcagttttataaacacaagtctgccaggctttcagcaattctaaatttccttttgcaagtcaggctggagttaatggctctttcctgcagcggcggagatgacagggctctcccacagtgctgagcaggcagtttgaaagccccacttcctgtctctgcatgggcgagtgtccactggaagccactgagaggaaggagggaaacctcagaaaccggcccctgcctggctgcttcaccctagaaagcccaggcagaggagggaaaggtgaagtgctgaaaaagaataaaaaagggggaacatgaaaaagagcaagagcaggaaggaggcagggacgggaaaggaggggaagcacggaaacagccaatgtcaaggagaagaaaagatggctggtggaaaggagcttccaggaattgggacacagccctgtcttattgcaaaagatggaaaccctgaaggagaacaggaaggaaaaagaaaacaagtccgtctgagctggcagggtccactttctcattctacagatgaggaaacagaggcacagagaggaagtggcttgcccaagggggcagattcttgaaaggatcatctgcactctctctcccttaatgcattcttacctcttctttactcgtgagtcagtcctgaaggacaagctgcctgaagtcccacacagatgggcctggggcaagcatcaaacatcctgggggccctgggtgaggtttgcttttaaattccaggtcagggaaaggaaggtctttaagttgtctgctctaagcttagtaatccccctcagagttatgggtgcggtgtctggggtagccgttgcgtctctgggcaaataccctggagaatgcagtgttggttgtctgagctggggacagagtgacagcatagttgcatgcagagctggaggctcctgcagctgtacaggtaaggtgctgaaattctccaccaacccttcctctttgcccccagcaccacgaagataaccctctttgaatatgtggaagtctgttctccaaactttctaacattctcatgtcagtcttaatagattcagctcagttactgcctcctccaggaagtcctccttgtctgcaaatcggctgcccaccatgccggctcactcatagttttaactctgtatctttctaatatgccttagcccactctgtcaggattccagtcagcttccttctcctagactaggagttgcctcaggccaggaggaccagccttgttcatatctgtaccctgcaaacctgtcaatgcccaaacctgctcagtgctttggagtatggaaccagccgtcaatgcaggaatgttacactctaagagttcccaaaggtagagagatgagggattggtgctggaagtgggaggttattctaaggatgggtatggcaggaaacacaattatagttcagggagtggagtgtccaggagtgggaggagaggaactgggagaaagagcagagagtgaaagtgagagcgggcacaaagaaagggaaaaagagtcagggatcaaccaaagtgcatgcttccttttcagccctgccaggatgtgcagggcggctgctgtggacgcgtcaaggctcagcctcaaacatgtcttcttccttgacttttgtctatcattctaaagctaggtcatttaaaaagttcttttgttttctttccaccgatactctgatttctgacattcgccaaaaagaggtcaagaccctggcataccgccctactaagattaaaataaatattatccattgaaactgttattttttccttaactgttatttgtagagttaaagattcccatgatcgcgctggctctaacatcatttttggctcttttgagatcaaatttgcaatttgatgcaaaaatagctgtgacgcatatgtgtctgtatgtgtgtggttaggagattttttatcattacatcttcttttgccctgcctttctgcctttctgtccttttaatttgcgggcttttggcaaccacagcacgggtctggtttcctaggagtttcttttgtaggatcaaaccgctagttggctcttggccctgtgatagggccctgggctaacttattgggaaaatgttgctgtaacccctgcccagaggtgcctgtgacatgggccgccatcttctcctcttcccttggcttcagccccacctagaaacctgaacaaacattttccttgacatttcataaagtgtcagtggctcctcatttagcaaaatacatcccagggaagttcaaaagtgaaaaaaggccgtaacttcttcttcttctcagggacctacagaaaatatgtggcacctcggcagcctggcctgcagcactcccctccccatcggtgagtcctgctacagtgggtccaggtgtctggacgcccggcacgcacggctctctgcagacctctggacagtaccatgggagccgcacagtccctgcctgttctgtccggcagttcttgtttcccagcaccctgtctcaggtgagaggttccctcttctgctgggcttctcctccctgctgtgaaccccaaatatctgaggcaggtcaatttaggaaccttattttgccaaagttgaggatgtacccatgacacggcctcaggaggtcctgaagacaagtgcccgaggtgatcgcggcacagcttggttttatacatttatacagacatcagtcaatatatgtaagataaacattggttcggtcccgaaaggccggacaactccaagtggagagggggcttccagttcacaggtagataagagacaaaatgttgcattcttttgagtttctgattagcttttccaaaggaggcaatcagatatgcatttatctcagtgagcagaggggtgacttggaatggaatggaaggcagttctcagtttaaattttccctttagcttagtgattttggggtcccaagatttattttccattcactctgcagacaggggcttctgtgcatccagggagcccctcctcacagaaggaagcaggccattaatgagacccaatccagcttcaaccacctggtaacaattaggacatcacttctctgagcaagagctcctgcctgtccatgagttatcaagacattccaattgttcctccacatctttgacatgaagacttgagggggtcagattttccagggggcttgatggcatgttctcttcactgttccctgccctggtcatccaagtgacccttggcagggaagaggccccgagttgcagaatctctgttctcacaagccattgccaacccggagagtggctttgccactattcctagcatgttgttggctatttcaggaatgggagtatttgacttttccctttgcagtgattgctgcaaggagaggaattgagagactcaagtccctgagataaatatttatcaactattactgaaagggagtatgtcaaagaaaaaatgtggagaaacttcagcttgaacacatagtttaaatccagcttgggtgtactccagtgggcatggatgtattactgttttgcagtgcattcttctatgatcaatacacagaagcaaacaggccacgtgggtaaacagtaattttcatttaccagggtgaatatggaagtcctcttgtttccatgtcatgatgaaggaaagcaaggaccatcttttgccaaggaacagtggctgtgggggaactgaggagatggaaggacaaggcagtcaaaagctttggaacaactctttttttgagatggagttttgctcttgttgtccaggctggagtgcaatggcacgacctcggctcaccacaaccgctgcctcccaggttcaagtgattctcctgcctcagcctcccgagtagctgggattgcaggtatgctccaccatgcctggctaattttgtatttttaatagagacgggatttctccacgttggtcagctggtcttgaactcccgacctcaggtgatccacctgcctcggcctcccaaagtgctgggattacaggcatgagccaccatacccggcccttttttggaataattttataggttttcaaactattacacttacctttttatataagagacaggacatagtcactgaacaatcactccagattttaagtaagtccaggatgggatgacaatggaacaaccatgaaatgaaaggaagaatgtgtcactggtatgtccacacgtctccaaatctctcacctctgtcagctgcaaacagagcctgaaataaatgtttcctctgtgcacagcctccacaacttcctccctccacgtttctcactcactcctctccagcacttctctccgggttctgcttacaaacttgaaaccggctatgcaaaaattataactgtggaaattatgacagtgaaagagatcagacctaaccgactccatcttgcttctaacctttaagctgtccttgttcatttttgggctgaactaactttgggaaggaattcagttcatggtagaactctgaaacaaaattgataatagccctttcctgaaaagacccccttcttgcctggggacaagtctgccattgtaggactaacaaattaactacaagattagaaattaaggtttagggttcatgcagcctccagttccaagagtctaaacctccccaaattgctcctggggataacatcactgttgtaaaagctaagaccagtgcttgagatattttgtagaccctgctctggatggatcagctgacaccatccagactggtaatttggctcaaccagctctgccatcccacccaggaacagaaaaatactcacttcatcaccccatgagtccatctctaacctgaccaatcagcactccctacttcccaggcccctactcgccaaatctgcctttggaggcagataacaacttatctttaaaaactctgatccctgaatgctcaggagactgatttgagtaataataaaactccggctctgcatgaattactccttttccattgcaattctcttgtcttgataaattggttctgtctaggcagccagcaaggcgaaccctttgggcggttacaaactcatcctctgtggaagagtaggagttcatggagaaattggttgcaaattacaaaattttattgtaaggtcaacttgtcccagtgtccgtctgtgcagcgaagggcccctgcatggtttagtgattgcaagttgagcctctagggtcaggttgtctaggtttccatcccagctcattcacttattatctgtgtgttcttgagcaagctccttaatcaattgaggctttgtccttctgtttgtataatgatgagaataataacctccacaataacctcatcataaggttgttgtgaagatggatcagataatatatatgtagagtgcttataacagtgcctggcacataaaaaatgctcaaaaatcttaagtgttattaataataaactgacatatatttcttgagcagggtggtggtaaatgggtgttctttttattaagctttaaagtgtgcatagatcatattaattctttttatgcatatgatatattgcacatgcatgaaaatacatgcattaaaaataaatgagcatttatgagatttagtttagcagtcacatgtcccaggattacaagccagcaataatgggttggaaaacattccaacccattccaaccattggaaaacattccaacccatcactggacccatgtgccaaacaatggaaccgcccacaggttctcattcttggttaaaaaaatatgattattacgggaataatactgattccctaagaattaatatctgagcaagtttcttttttttcctgtcttcttggaagatcagcaggttctagattcaatggagtcactaggattgagccaccagtatacgccagtcctctccagaacggccacctggtggtgggcactaaggcagtctcagatgaggactgattgacttttgtgtgaactcaaactgccaaagtccctccctcaccttgcaaacttcaaagcacaactttcaaagcactactttctttcttggctctcaattctctgcctagaaaaagggaggtgttggcaaggatgtttgtttagttctgggcatcagtcaatggtacccagatcttgctgaacagaaaagacacagatttgtttctctgaggcagttggtagtgcttattgcttattgctctcaggggcttctgcagcagtagaagggccctcttcccctgccatgccacactgagaggagcatccttggagtcatggttggaatctgtttttgttatgctagtcctcttccgcatgctagctgttgcattgcagggatatgtgtacctgtttatcttctccactaggctctaagaagccaggtttcttaaaggaaggaagctgatcttgtttatcttgaagtcctcacagtgacattgctcagtcaatgttgagtgtatgaatgaataaacgggaaccatcacgaaaaagccgaaaatacagtggaaagactggatcataaaatcttctaagcaaattttttttcctcttacactccatttccaaatagataaagtattttttaaaatcctatcagaatattctaacacactgagttgacagaatagagatttttaaatgcagtgtcatttggccagccatttgtgagaatttataaatgtttcagtaggttgaaaacactataaaagcaaggactatgttcatacccaacagctggcacttagtatgaatgctaaatgaaacattctcttctctttcaagagtcagtccaaccagtgaccctgacaagaaggaaggcacatttaactcaatttaatgaactcttatagagcatctccttctccaagtgctttgctaaggatggggtaaaaacatgaataagtcttggattctgtccttcaggaattttcagtctttggaggcagatacatttgcacccaactattatcctaggcagagtgtgataagtacgataatagcagtaaaagctctaagttaggcaggagaggaggagctcgttaaagcttatggggcctgggaggctttcggcggagtaaactccagggggacagctaggcatctggctgctggaattgggaggaggatcattttaagtggctacaactctgggtgcacaggactagagggtgagggccaagatgggaaattgtggcagccatcttccacactgggcgcccgccgacccttgcttcctggtattcatattattgtgtagtgtcccccaacattgtatcagggttggcctgtgtgaccaattgcatatggtgggaatgatggtgtgtgacttctaagaccagttcatagaagatgtggccaattcccttactgtctttttttttggcaggggagtgccgagtttcacccttgtcgcccaggctggagtgcaatggtgcgatctctgctcactgcaacctctgcctcccaggttcaagtgattctcctgcctcagcctcccaactagctgtgattacaggtatgcgccaccatgcctggctaattttgtatttttagtagagacggggtgagatcaatgaggcagtcaattggccagcctggttttgaactcctgacctcaggtgatccacccgcctcggcctcccaaagtgctgggattacaggcatgcgccaaccgcgcctggcccttactgtcctttggatcagctgctctggggctaggtcaatccttcatgtgactgcagccccagccaacatctggactgaaacccatgagacaccctgagccaaaaaagcccagctaagacttcctgcatttctgacccacagaaactgagaaaagaaatgttttgttgttgctttaagccactgacttctggggtcatttgttttgcagaaatagatagcagatacagaaaagcaggctggtggaacagtgtgggaaacaccttgattttcagggagttgcactttgtttatgtgcaatggtgcactgtttttagaaagacacaaagatgataatactggtgatgggcataatacgggttgtcaagaggagtgactgaggcggggataatttaagaggccacagcagtagtgtggcaagaggtaatgagggaattgaacttggtgggaatgggtgagatcaacgaggcagtcaatatgggcagtgagtgtgaaggagctgcgaaggatgattctttggttttgagcttaggaacatgagagaaccaagatctcatttatccaaagaggaaacacagaagtgagcccctgtttgggggcagggctgggtaggaggaaaagagtggagacgtctatctccccaggaagagagccccctgcttccagatcccagtggatggcagggcactcggctcattcacagactgggctcgttgagaaacctttccctggagggcagggctgctctgtttcacagcccatatccctcatggccaagtgttcctcgagtgacagtctctgccatcaatatttttagcatgtggtctttcagagactaaagagtggcatccatctcctgaaactccttccccagctgacagctggtgacccgtggaggagggagcttcagggagcctgatgggcgagagtctgttccaatgccaatccattggaagagatgaagtcagacccgagtttgatagaaagcctacttcctcccttgtatccagctgtggagacctaccaacatcaatgcaaaccagaagctaacacccagttcatatatcccaagtggaaggaagcttctcgtggaattgtcttacatgacagtaacataaatcctgaaggtaatacttggccaggtaatgttagaaaagaacccgaacataggcattgctattatagatcctaggataggcctgagcaaaaactgtctgggattcataacatgcttcgttgcaatctgatagagggagtgagatccactccaaatggagtctgatttggggcaaagcaaagagtatggaaggaaacttgagaaagggggacagcttctcaaatggagtctggccacagctggggctggaaaagagacatgactgcgcttgcagagtggtgagaatttgctgctagaatttttaagttgtgtgttttcatttttatgataatgtaaactgagataagcatattctctgctatcccaatgagcccctcctctaggaggactaccttgccaccttatccataaatgtgtttataaattattttgatgccagctggtattttttaaaaagtggttttggactcacaaaaaaaaccatgatggatttaatacataacaaagcatttgtgtcaagtgaaggccaagtaacatcttagcgtcctgtgtgagcgaaggtgtcgtggcagttcaaacaagaatgccgatgaagctgcccaggatggccaaggccaccttggtgtgtttgaggggaattagagtttagaaaaaaaaaaaaaggcacctgacactctgaactaatgtggttacctggaattttggggttttgaagctttgcatttaatttgcagcttatggcctgaaggaaaagacaggtgaaatgcatatcctgggatgagtcacctggaggagagggctgggaaggggctgagctgcacatgctcagatcttctcccaggcttatcgacccagtgagtcaagtcttcttccaacgggatagagtgtgagagagagcagggaacagaagccagagtctctgttaaatttctcggtacatttctgttagagaatggaagtttctctatcgtaggagaccttgagagcctgggatagaaattacccctttgtcatgtattttcctcccagaaatagcatggccactgtcactgctaagctggagtatcatgagcacaatttctctcactttctatacccatgcctttctaggagattggtggctccatcaaaaaggagttaaaaagaagcagcactattttgtggaatacaatcatcaccattatcaccatcagcaccaccaaccagcaccaccattatcaaaagcattcacctggtgtctgccttacaaactgcaaactgcagtaggtatttgtaatagaatgtttcctttcccccttgggatctgcagaaaagctggagaatgttttggtatcaacacactaggttgcattgctaatcatgtgatggccccatgacagtctctgttggctggtgtagttcaggtggacgactgcaggattttgttcttggagcctcagttctgactgggcttggggtgtaaaaggtttgggagccagatgacaagagtatttgatgggtagaataatgggttcatccaaaagatcaccagaatggttattaaatagtacaaaggaggaatttactggtaataccagtttgcaaacagagaagagagtctccaatgtggactgaaagtgctctctctttgaagaggggaaggacagattgggttttatgcctcacaggactggtaccatacatattcagcaggtttttggggaaaatctatacatatttataaggtgagctgatgcctgcataatagataaacatatatgtaacatacttttcatattcattttgggactgggttttggcactaaaatttgtggaatttggctctttatgttaaaaggtgaactagaggacacaaagacggtttgtgtgcaccctctataaactggctgaaactggcttaaggtctgcaactgcttatccaaaaagaatgtttgtaaggccaggcctctgtccagtcagagttgtagtggtccaggttgtaaatcaaagtttatagctctttttgttagagagttcagctgtaggaatttagaaatttgccatgcctgccaggccctgaacctttgacccataggtaactttatttccttaaccttagggtcagtcttagttgatatggggcatctattctggtatctcagatcctatggtcaagagaaaagatcctccacaagagggtcctatgtggctgcaaaaactgctctgagctaaatccactcaaaatcactgcaggatgtcactactagaaaatagggcagggatagggatccccttcccatgctgccagaaaatgcctgatagcttacctcccccggcccttgaggctcccttggaataggcacatgcaatcccatctccacccaatagagcttgtcctagagctcagttttttcccatagttttcccacccacttgcaccagaaaatctaataaagtcatgtgattaatacaattcattttatcacgcttctgaagatttaagagagagcggtcacattggattccacagtaccgaccttctgacgattcttcatttcacctttatctatttttatttttattttatttttttttcgagacggggtctcactctgtcacccaggctggagtgcagtggggcaattacggctcactgcaacctctgccttctgtgctcaagcaatcctcccacctcagcctcccaagtagctgggatcataggtgcacatcaccaagcctggctaattttttgtatttttggtagagatggggtttcaccatgttgcccaggctggtcttgaacttctgagctcaagtgatctgcccaccatagcctcccaaagtgctgggattactcacgtgagccacctcgcctggtccctttcacctttattatctttgcctttaactctagtgcttcctccctgaatcagttaaggattgcatttggctgcattaacagaaacctgactgcagaagcttaaccaaatagggtagtttttaaagagagattgcttacatcacgcaaattgcacaaattttaagtgcatagttcaatgagttttgacaaatgtagaataacatagctatataaaaccattccatcaaaaaaattttatcaccataggaaattgtgtcctgtccctttcttgtcaatcccaactcctccccacaaggcaaccttcattctcatttctctcaccatagcttagttttacatgtttctataatacagcatcatataaatggaataatacagaatgcaatcttttgtatgaagcttcctttggctcaatgtaatgtttatgagattcatccatgttattgaatgtatcagtagtgttttcatttatatttcctagtgttctattgaataaatatactacaatttgtttatccacttatttgttgatgaacatttggaccgttggcaatttttgcctattatgcataaagctgttaaaaaacattcttgtacaagtctttcatttcatatgtttttctttttctgaggtaaataactacaagtagaattgttgggtaataaataggcatccatctaatattataagcaactgcacaacagtttttcaacgtggctgtactatttcactctcccaatagcaacgtatgtgttttccagctactccacatgctcactggcatttcctgttgccagtttaaacatttcagccattccagtggatatgaaatctctctggctataataattgtatttctctgatgactaattatgtcaagccccttttcaaatgcttatcagccacttctatactgtcctctgtgacatgtccgttcaatctttttgctcattctttaaaaacattgggttgtttgtctttttcttagtttgtcttttgcttttcatttataggagtacatatcttcggaatacaagtcctttgtcagataaatgtattgtgaataattttctcctagtttgtggtttgccttttcacattcttaatatcttttgatgagtggaaactaactttcaaattatgttcagtagattaacttgtttttgttttgttttgttttgttttttgtttttaacactgggtctcacttgttgcccaggctggagtgtagtggtgccatcatggctcactgcaacctctgcctcctggactcaagggatcctcctgcctcagcctcccaagtagctgggaccacaagcacgcaccactacacttggctacttttttatatttttggtagacacaggatttcgccatgttgctcaggctggtctggagctcctgagctcaagcgattcacccacctcagcctaccaaagtgctgggattacaggcgtgagccaccacgcccagtcgagtagatcaagttttaattttatggccagtagagatctatttcaaggctctctattttgttctgttgctctatttatctacctttatgccaattttcttctcttttgattcagatagggttataataataattattttttccagggattagatggaccagggctggtgaagttgttcaagggagtgatcaagagcctggctcctttcatccttctgttccatctcctttggctcatggattttgttttccaagtggcaagatggcgcctccacctttggtatcctattttagttcctggcagaaagaaaggaacaggctaatggccctgatgagtctacccccttttaacaggagaaaatttaaaaaacaaaaaccatgaaaccctttcccagaggcaacaaccagaattccatttatctttcattgaccagaacagaccacatggtcactggtggtggcaatggagactggggagatgaatatttttaaggtggcatattccagaagaacactgtgcactgattgcattaatgaacccattaatgtgccaaggggaggtttacctatgagcatgggcaaattagaacccactcttggagctgcaggtgagccaatcccacctaaacagtgtggatgctacaagatggggaagtaaattgattctattccataccctaacctctctccaagatgtattcttaaaatagaagagggaagacagaagaaaacatccagaatatatttttattgtcttttacttcttcagtgcattttagatcagtgcttctcaatctggcaaggggcatgcaggaggatgtgagttttatcaggaaaactacacaaccccccaaccacaatgctacccccactcctgtggaccttctttaagagagactcactattatagatggagttgatacgattttaagagaggccatatattatttgctttctgtcttgaaaaacttgtgatttttctgtattgtgctactgccaaagagaatagaaacctgactgaggtgtcaatgtttatgtaactgatttcatgtactttctgtagttctaccatttctgatggttaaaaatttcttgtgtgtgtgcagttggggagtgtgtcctcctccttctgctcttataccacacattagcacatcaaaatgctctaatctttgtatgattatgtggcatgtggtgatgcagcctcacagtggaaaaacttctcttgggccattgcaaatgtaacatttctttcaatcagatagtgccattaaggatttcattatggccgtcacatcctgtgacatctctaaacatgcagcattagggcctaagtgcagccctgcaggtagagttgccaggtttaacaaataaaaattacacgctggccaggcggggtggctcatgcctgtaatcccagcactttgggaggctgaggcaggtggatcatttgaggtcaggagttcgaaaccagcctggccaacatggtgaaaccccatctctactaaaaatacaaaaattagctgggcatggtggcaaatgcctgtaatcctagctacttgcgaggctgaggcaggagaatcacttgagccctggaggcgggggttgcagtgagcagagatcacaccattgcactccagcctgggtggcagagcgagattctgtctaaaaaacaacaccgtatttggggcatgctgatactaaaaaattattcattgtttgtctgaaattaaaatttaaattgggggccctgtattttactgggcaacccatttgcaatatcagcaacaatctcttattcagaccactgattaagtgtgcaaaatttgaatctctgaacagtacctatgtccttgatatcttaaattaatgagtgtcttagacactcaaagcaggaggaagcattatggcagatgtttgagccccagagatgtccatgagcacagcatagagctcagagccttctttattatttgcttcacgacagagcaaaggactgcagcaggttgactgatataaaagttttaccatgtctcacagcaggcctttgctcaagtttccagtaaggatattgtatcatttcttgcctgcagtacttgtaaatccacttacactgcctgctgttgagtcatttgtttcgtcttgagtagcatgtcatccttgttcctagaagatagtgagtttagagacagtagccaagcaacagcagagcagcctcaaccaaaacgattttccattttggtgggatgaattgaaacacaagcatcttctatccaggggagatttggggatcataaagaatcaatctgagctggtaccaccatattggctgctgcattttctagagttgccgtaactagtctcacaagctgggaggctttacacaacagacatgtattgtctcatagttctggatgctagaaatctggaatcaaggctccaggggagaagctgctccatggttttctcttagcttctggtgttgccagcaatccctggtgttccttggcccgcaggcggatcactcccatctctgcctccattgtcacacggcattttcccagtgtgcctgactctgtgtttcttctcataagaacatcggtcatattggattacaggcccgtgctactccattatgacctcatcttaacttaaacaattacatctgcagtgatcctgtttgcaaataaggtcacattctgaggttccaggaattagaacatagacatatcttttgggaacaaaattccagtgataacagtttcggagacagactagtcctggagtttgtaaggtgagccaggaccaaggtgccaggattctcattttgtaaggtccaggaacaaagtgatgttaatagaaagaacatgtttttgtttgtttatttgtttttgagacagtctcactccatcacccaggctggaatgcagtggtacaatctcggctcactgccgctgccatctcccaggttcaagcgattctcctgcctcagcctcctaagtagctggaattacaggtgtgtcccaccatgcccagctaatttttgtatatttgtgtgtgtgtgtgtgtgtatatatatacacacacacatacatacatatatatacatacatatatatatacacacacacacatatatatatatataaaatatatatttcttttagtagagactgggtttcaccatgttgcccaggctggtctcgaactcctgcgctcaagtgatccacctgtcttggactccctaagtggtgggactacaggcacaaaccaccacgcccagacagaaggaatatgtttccttccagtctcacttgactggctgcttccctagataacaacagaggatgtctgttgcagttctcattgctggggagtctaaactggaataaaacacccactatctccatcaggcttgcactagagcccagctctagctggagagaaagaagctaacccgcacagacacaggactgtaggcagggagcatccgggggtatttgggtcctggctctgatgtgcctaaggccaacttctctctggccatgctggcgtgcatgagctcactaatcttcctttttgccttccattttctccaatcctgacttagcaaaggttgggcaaaagagactctgtgtgagttcgagcaaagcctgagatgctggattttccaagatacgagaaggggctgggggctgggtgaactggtggtggaggagggaaggattaatttcccaaggaggggaaggggccaggacatcaggccccggggactttgaagagagggtcgtgggtaggaggtagatcaagtggagtgacacaaaggtcaggaaagaggaagtgtccacactgtccttcgacagacttgagtctatgggacttcctccctgcacggtacaaggaaatgagtaagtgagataatgttgtaacttctggccctctgacattgcactgccccgatgtcacagttggaaactgtacctgcccccatccttgtctggggtgtgtttggtctggggagggctggtgaagcaagaggtactcagaaaaaggacagaaattgcttcctattatctgggcatttggaggtgaaggggtcacagctctggcaaagatggggttgaaagggcccggactccagggaggggcagctctgcatggcctgattcctgcaccccacctttgccccctcacacctcctctcatctcccgtttttgaagaggaggaccctgtcacatctggacaattctgcaagaactctgtagaactgacttcactgtgaaccaggctccagaagtcaacagaaacaaaaatgctcacatttaatcacgatgctccctggcatacacagaagactctgaaaacttctgaatttgggaaatcctttggcaccttggggcacattgggaacataagccatcagtgctggtgtgtgtgtgtgtgcgcgcacacgcgcatgtgtgtgcatcttctaccatgcctcctacaaatttgacctgggcccagggccatgttcggtggtttttaagaaccgaggctcccagaagcagtattgggcagctagagtggccccaggatctatatcaaactctacctgtttctgaaccaaatttcttctagaattttattccataaatctgaattatggtgtcagactcctagcatacactaaaggaactctctgccttgcattaaataacaggagttacccctggaggtaactcctagccctggctctttagagaacagatgccgaataggcattaggggatgtgatggatgtgctaactttcaaaaaaaaaaaaaaaaaaaggcctgagctgagtgctcagagattcacaaaaagctgacagcatctctctgttccattggaagctgggtgatcctttctactctttcctgagaaaggcagttgggcaggaaaaagctgtatctctgtcctcactgagagggtttcccagtctgagggtgaaggatcaggagagggagacctgacgggtcgatgtggggcatcatccacttgagtgagaaccagagggatcccgtcattgcccagggcagatgctccattttggggggcatcattcattctttcctgttctccctgcattcctctggctcctgcccaggagaggtggccgctggcaagagagcttggtggaggtgggaggtgggaggtggggggtggggggtggggagttcttgagccaggacctagcgcatagtctccagcctgctgatggctgtcttggatgcttcaaaggggagaagatcctagatgtgggaaacattggtgggcgttctgctggggcatctgtagcctctgagaaggctaccagtctctcctaagcttacgccgtcacaccctgggcacttgttgaatgactttacttagcttacagcctctggttcctgttgggaaacttagggcttgccacagtgttcattttcctttgcgggcaactccgttcctggcacttatcatattacccactgtactccccgcttagagctgtgtcaaggttctgagaatctatcccttggcttggaaggggtcatctctctggccagatcatttcctgataggtcctgaggcaccacaacacataggaggcttgtcctctctctggggttcactgccttgctccttctccaggtcaatatgtgaccttggaccggttgcttgagtcccctggtcattcagaaacaattgggtttccctggctttggagcctggcagcctggctttgagaaccgggctttaacttgtcacatgactatggccaagttcctggggctctccaagcttcacttcctctgtaaaaagggcaataatataatacctgtcttattgggttttgtccatgttagatgagacattgggtacaaagcacttggtcccgtgcctggcacatttactgcacttaatgtatgatagttttcttattattctaataaacaatatggctttgggagtatagttctgccacattgcagtggccagagtgaaggtggtgagtgccttctggggccctgggagtcaaggttatccgcatgccctttcttgcttgctcctcagtgtggctgcctctatgtccacaccatgcagatgcaacaggtagtttgaacctctgaggcccacagtgggatggggaggcagggacatcacttatggggtgggaagtcacccattccccaggaaatggccccagctgccttttccatgactcctcttgaaaccctgtggaggccacattcgtgttggggcggtctttcccatgaggatatgttcagatgccgaggcattttgaaaagccctccatagagtttcctttcataacacatgatcatccccttgggcttctggttttttttctttcaggaccttattttcaggcaagtggcctttgacctctaaggctgtcctttcctagctaccgaatccagcattcaaagtgatggaaatatgtatatatagtaatagtaaaatatcagcacttaatggcctgataagaatgtcactgcaatgctgagtttggaccaacatttgcctgctcctgccattgagcccgggctcccctccagagctgagctgctgcaagggatctgagtaactagggctgtgtcagagtggcgatgacagccaccacatgctaaggaagagatccccaaggacaaggagaatcccacgtggagctacttgcttctttgtcagtcttgtttttcttatttcacaaccttctaaaacacaatctctcaacctctattgttagcttgcatttttcaatcatgagcacagctttacctggctccatgctttgattgactctacctgccaacactgcaacaacagggaaagggacaccggcctcataccattagatggtgtgtagcctgggcatgaggataattaaaaactcccaaggggattttaacatgtaacacagtttggaaaccattgatgtaagatcttcttactcaacatgtgctccaaggagctgttgtatcagcttatcagaaatgtagatcaggccgcacttggacctgtagaatcagaatctgcattttatcagattccgacattatttgtatgaacattagcttttgagaagtgttgctttaagagactaagggggtcaatctacctcactttgcagctctgtgttccttagtcattggctaaaatatcagcccccctgcaatgagccatcctcccttgtatagtcagtgatggcctgtgaacctttagccaactggaagtgggaggggacacagtccacaaaacactatcctgacttttgacaccaactacaagtcaaggggttccccaaaccaccctgagttgtgataattcgctgggagatctgacagaactcactgaaggttgttatactcatggttgtgatctcttatagggagggaatacagattaaaatcagccaaaggaagaagcacacagcacagagtccaggacagtgcctgacatggagcccctacggtcctctcccgtggagtcacggacagcgccactctcctggcattgatgtgtgacaacacacagggagtgttccccaccagggaagccttggtgtccagggtctttactgtggctctgtcacatgagcacagctgactgcccatgcggccgatctgttcccagactctccaccgctacacatcactcacagtccctgctctaaatcacacaccatgacccaatgtccccgggcaaatgaaaacacctctagcaggcaggacgttccaaagccttagagatcacctctcagaagctgagggcagaagccagacctctttttgggcagggttaaattctttattactgtttttgaaaaaactcccaaattgagtttttcctcttcacttacagcagcataacaacaatcatcaatgcagaagacttctgcgagcaaaggtgtgggggaaaaccccaagcagtggacactagctggtgtcctccaatttgattctgatgctgtctactgggagatagtgtcagatcctcaagcctaaaccctccttctcccagtcagagggctggcctttggaacttctgaccaatccacttcaagttgaggttccaaccactccgctctttgggtttggttgatttgctagagtggctcacagaactcagggaaacacagctaccagtttattgcgaaggacattttaaaggataaaagtaggcagataaagagatgcatagggcgaggtgtggaaaggtccctagtgcaggagcttctgtccatgtggagcgggggtgcaccaccctctcagtacatgaatgagttctccttcacctgcctatcagcctctacatgttcagctccccaacccagtcctcttgggtttttatggaagcttcaagacacccacattctttccccagagtatagggcaagaccttctctggggagggttttaagacccacagtcagaaaggtggggtggggtcaagattagagtcctgccttgacgggcaggtgaaaggggtagggggagtaggtgagaaaaattctgtttattttttctttttttttttgagacggagtttcactcttgttgcccagggtggagtgcaatggcacaatctcagctcactgcaacctccgcctcccaggtttaagcgattctcctgcctcagcctcccgagtagctgggattacaggcgtgtgccaccatgcctggctaattttgtatttttaatagagacagggtttctccatgttggtcaggctggtctcaaactcctgacctcaggtgatccacttgcctcagcctcccaaagtgctgggatcacaggtgtgagccactgcatctggccaaaagattctgtttttgaggcctgcctctgaggtctaacacactcaacattataacaagactgtagtaagggctatgggagttatgagccaggaactgtggatgaaaacctatcacagatatgcatatatatatatatatatatatatgcatatctataataactccacaactacacactgccttattgctcagttcttctctccatgtctctgacccacccttgcccccttcctccatccttttctccattgcatacccatccactgtgccctttggaatgctcacaccatgaactgcaaactctcgtgtggcttcagcctcttctctgaaagttcctctcacctattactttctctggaacctgccatccctgccaccttctcaaaaaaggccttttattctcttcattccacaaagctcagtgtcaaaacatggggtttacactggaagctgaggtcacatcagtagccgggatcagggtcgccctagctgcccaatgcagctcccaggcctcctgtaaaaccttgacctttgaggtcatgacagccctctcctgctatgctcatagctgaccactgaactcctggacactccctcccccaagttcacagagaatgtgggcacatgccttacagtcttcccttgatccaaactactgccttcatcttgagtgacagcagcatcttttggatgtcttggcctgtctagctttatttttttgtgttctgccatcaagttgctacttctgttgccatcgtgcctgtcagcgcagtgcaggctgtggtgaaatcccacgaactcaggcatcacactgaccgggtctgagtcctgtctcagttgtcagctagttgtgcaatgaagggaaagggacctacactttccaagcctcaattcactcatctatggcatggtgacaataatggaggttgatttaaagtcctttgtaagaattaagagttataatagacataaagtgctgtatctggtatacctagaaaacattccataaaagttagtaattgttggtcatgtaatgatgactctctaggctaggatttcagcttcattgcatgcacatggtgcactcacagggcgtgacctctctctgtctcagtaacctcatctgaggaccgggataatcataccgcttcaaagggatgtcataaagattaaataatatgtgtaaggctgcttgcatttagctgcattcaacaaatatttctgtatctttctcctcatttctccttactttcttgcttattatctgctctaggtatagatttcagagaactaagcttgttacaatccttcataaaataaccaggttggttagggcatttccaagagtcaatactgtttagtgactattctctgtttaatctattttgattgtccagggtcatcttttgctatgtcataggttgttggcttcttctagagaagtgagacgatggacaagttccaagtgagtgaggcgactggtcaggatattccgctgaaaaactcatgtcagttctaattcgtgattgtaattcaatcacagcctgagaacagtaggactgtagttcaaatgctctgttcccttttttttttcccagaggataatttttttttttctttgagatggagtcttgctctgtcactaggctggagtgcagtggcgtgatctcggctcactgcaacctccgcctcctgggttcaagcaattctcctgcctcagcctcccaagtagctgggactacaggcacatgccaccacgcccagataattttcgtatttttagtagagacggggtttccccttgttggccagggtggtcttgatctcttgacctcatgatccgcccacctcggcctcccaaagtgctgggattacaggcgtgagccaccgcgcccggcctctagaggataatttttaaatgtgcttttgcatttggaaaatgtgattggcatttttttctaattttctaatatgatacgctgtcggatgctatggattacttaaaccctctggctacctagaaagatctttaagtggttctcaacaagcttcatacgcaatgtaaattgtattatctctcaggatgtgtgagaacatctgtttttcttctaatgcagtaaacatataagggtctcttgggatatcttttaaatagacttaatacaacattcaggaatgataacaaaatataatcacagttgtaagggaatgtgagcatttcatattaataacattggaaccttatgtttaatacagtgttaaaagttgacaaacatgtaggagtcagaaaattcaattaaaattatcacagtaatatgaatttagccacatcctgtgttagttatgaaatccatttaacaccacaaacagtaatatttttagccagtttattcaaaaggaaaacaggaactaaaccactttcatgcaatatatactctgttaatgtggtcaggctaattttgctgggggaaggaacttaacttttgaatatttgaatgcccagtcatttaatctgaatatcctatttccttgcatgttgcaaaatttttgtcaataaaaggcagaaaaagaaatctcttctccatgctcatccctaagagaatgggttgtctgtaccctgagagcattttatggaggggacaaccacttttctaattttccttcccacttctctgtgggcacaaatgctctttggttgaaagagttgtaattcagtcccaagatgaggtgtggttactgcatccctaacctatatctggggaccccacagccacacacatgggggaaatggagcttgtcattcagttctccagccattgcacagggttcatggactcttcgttgatcccaccccacgcttcttctctctgctagccgaacacacttctctcttctttatcaggaggccataggagaagggcattcatttttaatacacatacatctgcatcaagtctaattttgccatgtctcaatccaactgtcaaatgggttgtttgggggctatggtgcttatcaaacatttactcaagaatagccaaaattagccaagcaaggagaacttcagcaacgttcccaaatggccccaaccaagtactgtaagactgaggatagctaaagggtcttgagagggacttctcaggcagtggccccgacatttatctgtttttttaagtgagaaatctgagtaccattcttgactcctcttccttacccccaacccctcactaagccttgtgctactatttagtaaacagaccctcaatgcacaaacttctgtctaaggccatggccaccaccctagtctaatccaccatctcttctctggaacagaccccagctgctctccctgtctctgtgctggtctctcaatccatgctccacactgcagccagagtgctctacaatgcaaatccatttgtgagactcctcctcttaaaatcctcaagtggcttctctttgcccccaggatcattttgaaactccttaatggaagaggcatggccctttgggatgtggttccccaacccctcccacatcatcttttcaatcagatttcccactaaatggaaattttttcaggtcctcaactttatggtgactttctcttgctcaggatctttgaacatactgtttcttctttccttttgtatttgccaagacaacacttcctctggtaagattttcctgacatcctctataaaaaaagattgagatagttgactacccaaaatgtttcccattcattccaagctctattcaaggcagtaaagtgcccggctgacagattgcattcctcatcttttctgaagctagcaatggccatgcaacagcattctggccaataagatagaagtcgaagttgaagggtgggatttccaagaaagctcgttgaagacataattcctcatttcacttcttactctttctctttcctgcttcctaaaatgcggtgcagatggcagacacttcaaagctgtctcaggcaatcaggtgatgttaaggcagaaaccagctttatgatgggtagaacaggaagaaagaaggcacctatgttcttgttcaccttgaaccacaccagcactgccttgcctacccctggaattcctttaatgagaggcaaatgagagcttacgtgtttaagccattgctattttatttttttttgtttatatgcaaaagaacttaatcctaactgatattaacactaactgggtctattgcttggtaccaagccaatgcatgacacatggtatatatgctcagtaagtatttgttgaatgagtgaggcaatgaaagaacatagaggatatatataacagtcctcctgcccagatgtcatctgatcctctttaggatctgggcccataaaactgtatctgatatagtttgaatatttgttccctacaaatctcatgttgacattttatccctaatattggaggcagggcctagtaggaggtgttttggtcatagtgataaatggcttggtgccgttctcacagtaacgagtgagtttttattctagtggttcctgcaagaactgattgttaaaagagcttggatccttccacccctctctcactcttgcttcctctctctcaccttgtaatctctacaagctcttcacctccccttctccttttgccataagtggaagatttctgaggcctcaccagaagcagatgttggttccatgcttcttgtacagcctgcagaaccatgagccaaatcaacttcttttctttataattatccagtctcaggtattcctttatagcaacacaaatggactaagacagtttctaatgctatggttcctttagtaggtcagtgtaaaaccctggatcactcctgtaacaaattacttggaactcttctcaccatacatatttaaaaatagttgccatgttgaaaatcctataagatcatattttatttcaaatccaacaactcattgctaaggagatacaagaagcagaaaatacagagagactaatgtgttgatgatttttgtgagggacataaggtctgtgtctagattcatttttttgcatgtggatgtccagttgttccagcaccatttgttgaaaagactatctttgctccactgtattgctttttctcctttgtcatagatatctggtcaccttaccttagagtcacagatgaatggtcctattacttaactactgaaaatacaggccaaagcaaacagaggaataagggatatataataaagtatttgtgtacttgacttggctctaaaggaagcattgcgtgtctgtgtaaaaagaatgggtgagagttttccaccattcaatatttctaatctttctgaaatacaaagccaggacatcctctaatccatacattccatagtttggttaatataaattcctttattaaatccttattaaataaagttatttatgtttctatgaaactcattttaactcctaagtgaaaaatactactgagctaactaaacatcaaacatttttaattttttaaatttttttagagacagggtcttgctatgttgcccaggctggctttgaactcctgtgctcaagcgatcctccaaactcagcctcccgagtagctgggactacaggtgcatgccactgtgctcagctaaacatttttttgaaatgctcttttaaaatcaattttattgaagtataagttacataccataaaagtactcattttgagtgtacagattgacaagttctgacaaatgtgaacaaccatgtaaccatcaccaaaaataaagatatgagacatttccattaccccaaaaagttcccgtgtccctctccagtcaatatccagccctagccccagctccaggcaaccaccaatctgctttctgttgctataaattgtacttatcttttctagtgtttcatacaaatggaatcatacagcatttactcttttgtgtctgtcttcttctgctcagtgtaatgtttttgagattcatctatgttctgtgcctcagtagtttgttctttttattactggataattccattataagaatataccacaatttgtttatccatttactgcctgatgggcatttggttgtttccagctttgaactattttgaatcctaaaagactgccagttttgaatgagaccccagaacaatgaatgtaggctctgtatacaagttcaggctgctgggcaacttaggccttaagacacaactctgccacttaggccttaagacacaactgacatgatggtgcttaaagtggctgtgatggaaaaggaggctgtttggagcctttggagtgcctttataggtgaaccccagcatagcacctaatgatttggagcaaagctgtgtcattccccaaagataactattcgccttttgagaaacatcttctagctactatcaataataaacacagaatgcatcaccatgggccaccgtgttgtcttttgacctgagtttccattgtgaacaagagtcatttgatccaaggcagaaagttgggtgcacacagcagtgttccatcatcaaatggaatatgagattgggcccaagtaggtcctgcagacacaaataagttgcaagagcaagtagtacaggcgcttggcctggccagtactgttgccaagttgactgcttcccctcagtctgcatctgtggcttcatggggagtttcctatgaccacttgatggaggaaaaaacaaattggagcatagtttatagtgctggtactacccaaagtggctagctgaggcactacatctccactctggggtgcccgtgaaggacagtgccaaaggaaaaccccctcagtgagcagaacttggagcaatacaagtgggtgttcattttacctagaagagaagatgtccgtgagttacagatctacacaaaatcacagagagtggttaatcgtttagtctgatggtcagggacttccaagagacatgattagaaaactggtgacaaggagtcctggggaagaggcatatggatacctctgaacacacacaaaacatgagaatatgtatcccatatgaatgttaaccaaagagcagccacaacagaagaggattttaaaatcagctgaataagatgattcattctgacagcatcagctagtctctttccccagccactgttgcccagtgggcttacatatatcatggccatgggggcagggctatgtatggacacagcaacatgaatttccactcatcaaggccaatttggctccagccattgctgagtgctcagcctgccaagatagaaatctacgccaatatggcaccattccctgggctagaaaaccaactggtggaaggttgattacattggaccatttccatcatggaaggggcagtgctttgtcttccctggaatagacatttactctggatatggatgtgccttccctgactactacaatgctctgccaaacctaccatccatgggcttaattttatttgttataaaatttcaaccaccattgcttctgaccaaggaagtaatcttacagcaaaggaagtacagatatgagcttctgatcatgggcttcactggcctcacagtgaagcaggtggccagattagaacagtggaatggattttaaaggctcagttacagcaccagctgggtagcaacaccctgctggcctggggttatgtcctgcaggatgctttaagtcagtgaccaatatatgatgctatttctcccattgtcaggattcatgggtccaagaatcatggggtcaaaatgggagtggcttttctcactatcaccctggtgttcgggtagtaatttttccttcccattcctgtaactttgggctctgctattgcagaaatcttagctcctgtggggggaatgcttccatcagggaatacaatggtggttccactaaactgacagctgagtttgccatctcctcgtgccagtgaatacacaagcaaggaagggggttcctttctcacctagggtgactgatcctaattaccaaggagaaattggactgccacttcacaatgagggtgaggagtatgtactctatgtgtctgtgattaatgtcaatagaaagtgacaccaacctagtacacagaggactgatcatggtccaggcccttcaggaatgaagatttgagtcaccaggcaaggaacttggactcactgaggagggcatattccaaggagaatattttatctatgtccatctatgtccatctatattccatctgtgttccccttggaattcctattcatgaacatggggaattccaaggggaatatagaatgagtagtggaaggtagttataaatgtaagtcaaaaaccacacaaccaatttgagaaatgaggaaggtaatagtgttgaatatgtcttctttatcttgatataaatgtatttgtgcatatattaaccagtttatttatttattattattttttgagatgagctctcgccatgttgcccaggctggtcttgaactcctgggctcaactgattctaccatttagtcctccgagtagctgggactacaggcatgcaccaccatacccagctgaccagttttttcctattcctctacttaatttctctactatacaacataatatgtgttaatggtagttaactttatatctcagtattaagtcacaagatatcaaaaagggaatgcgacttagttacaagcagaatgaatatcactcaaagatgaataaagagaagagggttagtgcattttctgttggatgagagaaagtttcattgttaggcagaagcatgattttgccttttttttttttttccaaggtctcactctgtggcccaggctgcagtgcagtggtgcgatcttggctcactacaacctctgcctcccgggttcaagtgattctccagcctcagcctccagagtagctgggattataggtgcgccaggttaatttttgtatttttagtagagaaggtgtttctccatgttggccaggctggtcttgaactcctggcctcaagtgacccacctgctttgacctcccaaagtgctaggattacaggtgtgagccactgtgcacagtcaccacggtctttttgggaggcaactttagcatggttaagaggtgcgaatggatgttaagctaacaccaggtaagccctggtagatgtgtattgtgtcagtgggcctacgctggagccatgtttccccaaattcacttttcctatgtacctctggattagtgtgggccactggagacatttcacatgagatgaggaaggtgggagtgaaggagcagcatctttttacactaagcaggtcggggagggcatgtggctctgtctcacattgttgggaatctgtccatcatctggttggcttaggtcagtgggtgagttcacagctgttccagcttctgctggaaactccttcggtttctctgactgctccgtgatgagggcatcagattctcctgcagaaagccccagtgttgaagttggggcttcatgttggtgagtgatagttacgggttctagcccaacctgtggtttcttgcaaatttcagtgtcagctcagtcttgcgggttttgggttgtccttgcttcccacacttcatgcctttctttccctcctgacagtctgccctttagattttaggattcagcaccagccacagaaacagcaacctcactgttaagggttgaattgtatctccccaaaaggtaggttgaggccctacctgccaggacttcagaatgtaacctcatctgggaatagcatcattgcaaatataattaattaagatgagggcatactggctcaggatgggctcctaattcaatacaactaatgtccttctatgacagccacaggaagacagaaacgccaagggagaacaccatatgctgatggaggcagtggcagctgccagccaaggattataaccagaagtcaggaaaaagcaagaaggaatcctcccttagtgattttacagggagcatagccctgctgacaccttgattttggacttttattccccaaaactgtaaaacaatacacttctgttgttttaagccactcagtttgtgctactttgttatggcaactccagaaaacaaaaatacactcagactgtttaatcaacctccataattgcataaggtctaatccctataataaatcccttaaaaatgtctgtgtatatatatttaaaaatataaaatatcttctagtggttctgcatctctggtcaatccctgactgatacagaatatgtattttcatttctaatgatgaaatacctgaatgaaatttctaggacatatggtaagtgtatgtttagcttttaagaaactgccaacttgggggaattgcttgaggccaggagttcaaacagcctgggtaacagtgataccctgtctgtacaaaataaaaaatattagcagcgtgtggtggtgtgtgtctgtagtcccagctactcaggaggctgaggtgggagattcacctgagcccagatctttgaagttatagtgagctatgatcacgccactgcactctagcctgggtgacagagtgagaaagctggtctctaaaaaacaaacaaacaaaaaagaaactgtcaaactcttcccaacatgttgccatttttacatttaccattttacattcttaccagcaatgattgatagttccagttgctccatacccttgctgaccattccaatagatgtattgtgttatctcattgtagttctaatttgtatttccctagtgattaatgatgtttaacatcttttcatgcacctattggctatatgtatatcttctttagcaaaatatatgttgttatttgaagagcggaagttttacattttgatgaagtctaatttattgattttttttttcttagatggctcatgctttttgtgttatctaaaaaaaatttgccttcttcatggtcacaaagactttctcctatgttttcttttggaagctttatatttttagtttttatgtttatgtttaagacccatttctagttacaatttgtgtgattttttggaagggtcaaggttcattttcttttccataagaatgtacagttgttctagcacccttgttaaaaagactttcctttccccattgaactactttgtcaaaaatcaactgagcatatatgggcatcatgaattttaatcctgttagaactgaatgttcccaaggcaggccatgcccatgactgacctcctttccttggattgcctacaaaacagataaagctaagtctggagcaaagaaatccatgtctaacctgtatttttttttttttttttttagatggggtctcgctctgtcacccaggctggagtgcagtggcgtgatcccagctcactgcaatctctgcctcctgggttcaagtgattctcctgcctcagcctcccgaggggctgggattgtaggcgtgcaccactatgcccatctaatttttgtatttttagtagagatagggttttgccattttggccagactgtcttgaactcctgacctcaggtgatctgcctgcctcggcctcccacagttttgtgattataggcatgagccaccgtgcccggccttaacctttgttttcttacacaacacactacgtgatgttttccacatgcatgggtcatttgcttcatttacgtacaaatgcataagcaatatactgtgtggtgtgagtttgtgatgggaaaaggaagaagttttgcggatactacactggcttcctgctatctgtctgtgtgaatggctatggactttgtcttctatttgttcgcttagcgcagatatgatcagcttacaacttaagattctagagaaagagggtcatatctgtaaagcactctgagcatgtgtgaagtttaatcaatagcatatgaggttacagcaaattcactatctttgtttcttcagctatagaatggcatgaggattcatctcaatttagttcaattctgttcagaaccatgagctagctgttcatggaaggaaagcccacctgattgtggccagggaaggagaaacaacactttaaccaggttgatttggttctcacagacaccattggcatgtgacatctggaacagaccatgcctggtctctgttcgtatcacttactattcagctcaatattggtctgaatattctttagactgactgaaatgaaaaggaactgttgtgtaaccatccataattccagcctgtagacctgggctgtatctctatgccctgcctggcacagaccccacctcctgctccttctccctcaccaccagtcaatccttgtcctaatgaacagggagggcaaccctgaatggggagtggagggaagagatgtcatgagatggcaacgtgcaccctgaagtgaggatgaaggctatgtgaatgttgtaggctgacagccgggcatagtggccccgttgccatggcgatggaggcatgttgatgcgaagtgtctgcacagctcctaggatttttaacagcagctgggcagagcctcggcgtccctgaattgttgcccccctgagtcactgcttggccccagctgtcctgatctctgttgacaaatggttgtccttcacagtcaaactactaacagtactctaattaatgaatgtgctaattattcttgcctactcccagcatatttgtctaactaacctgtcacacacagatcagtgcagcatatgcataattacggagagcgctgggagcaggggatgggtgggagaggggtgggctcgcagccctgtcgctgtgggatatttcttgtaaagttacctttgctaacggtcagatgtcgtggggatatgttatttcccgtgaagtgtatatgtcttcctttctttcctttctaagaatctctcttcagggctgaggggccattgctcagtgctttagcctgtgaggggattgccaggtacaaatgcagaaggaccagggagcccaggttctgaagacgattccggtagcagcacgtagggtgattaaaactccagactttaaagccagaccggcctgggcttgaacccttgttctgctccttgctatgtgggtctttgccttgaccacattttttttttttttttaagacaggatctccctctcttgcccaggctgtaatgcagtgttgcgatcacagctcactgaagcctccatctctacagcctcaagcgatcctcctgcctcagccccgagtagctgggactacaggtctgtgccaccacgtccagctaatttacttttgtagagttgggggtcttgctatgttgcccaggctgttctccaactcctggactcaagccatcctctagcctcggccttccaaagtgctgggactataggcgtgagccacggtgccaggcccttgaccacatttttaacccctctgaacctcagtttcactttctgggcaatgggaggggggtaatttgtccctcagagggttgcactgaggggcaaatgtgaggctctgggtacaatgcccagtacagactaggtccccacgacacagccgctcagcggctccggattctgggctgctctggactgcggccaggcggtcttctgcgggaatccgggcaggcagggcgggctgcgctcccctccccggctctcccggtgccccttgtctttttgttctgtctcagcagctctctattaagatgaatggcatttccaaaggcttcacctctgataagtgttcctctgcagctgcagccagaatcttaatgtgcgcgctgtaatttaatggccgtctcggctattaacacgctcttctcgggtgaagtggactccctccatccccgggcctctgcacgtgctctgcgcgctggctgggggtgactccaaggagctcagagcggggtgcccggcacctctcgccaggcgcctttcgaccttctaaagcgcgaatggctggacttttctcccatgtgtggggccccagaaggtgtggggccccagaaggtgtggggtccctgcgttccacggagcccggaaggtttccagtgatggtgggggctgaccacgttggtccccgtgggtgctgttttcatgtgccggcagattgggatgagtttaaaagacagaagcgtgtaggatagagaaacttctttaaaaactggaaattttaatctggggattataactattggacagtcaagtgcaagagtgaatacacttctcactccctcctcccaatttttatttgcgggattagtcagtccccctctgccacatgataattgtgagaactaccagggtcttcattctcctgccatctggttgacctctccaagaatggacacccgggcagcctgggccaatgaggctgtcctaagagtttagatgagagaagtcagtctttgacaggtgatggaagctgtaaaatgtaaaactccacagttggtgaagatgtctccaggaaacaggtctgcagagagaatacgtttgacatgctaagagaagctgagagagagcgagaggagagattggaagaaagacagagacagaggtagagagaagggaaagagagagagaaagggacagaagagagagaaaaaagagggggccgggcgcggtggctcacgcctgtaatctcagcactttgggaggccgaggcgggcagatcacgaggtcaggagatcgagaccatcccggctaacacggtgaaacccccgtctctactaaaaaatataaaaaaaattagccaggcgtggtggtgggtgcctgtagtcccagctactgaggaggctgagacaggagaatggcgtgaacccgggaggcagagcttgcagtgagctgagatcgcgccactgcactccagcctgggcaacagagcaagactccgtctcaaaaaaaaaaaaaaaaaagagaggaagggcgggagagagagagagagaaagctctctagctccaaggcctaaccacatctctgttcttttcaacttcagctgtcagatttttagactctttgagtgaataaattctcctttttgcttaaactagtttgagctaagtttctattgcttgcaactggaatactttgtaagaggactggccttcatttctgatgcattgtcactaagatgtaagtgttagaagagctaacgctttatggggttcaaactccttggctaccaaaacctaaacatcccctgaaacttaccaaactgcaggtatgaattggatctcactaaggtgaatatacaaatcttgcaagtgctgagccctaaccaatcttgtaataactctgtggtagttaattttatgtcaaattgattgagctaaaaaatgcccaggtagctggtaaaatgtttttttctgggtgtgttagggagggtgtttctgaaagagatcagcactggaatcagcggactaagtaaagaattcccaccctcaccaatatggtgggtgtcatcaatccactgagggcctgaatagaacaaaaagcgggcagaagggcaaattccctcttcttcttgagctgggccatccatcttctcctgcccttggacactggagccccttgttctccagcttttggattcagactgggtcttgcaccattgccctccatcttctcctgcccttggacactggagccccttgttctccagcttttggattcagactgggtcttgcaccattgccctccttgatgctcaggcctttgaatgcagactggtctccaccagcagcttttctgagtctccagcttgcagatggcaaaccatgaaacttcatggtgtccatgagcatgtgaaccaatttctattataaatctgcaatatatatatatgaggagacttatttatatattggttcagtttctctggagagccttggctaatataaagtctatactctacaaagtgccctaggtactcagggagtacccaagtgtgtcatgaccagcccgacagccctggctgctggcttccccgcacacaactctgcacgctgccttcatcagcctttctctctcagctgaaccgagggcattgaagcgggcctctggcactgtacctatgagggagcaatatcttcccctacactgacctcttccgtgccgagatgcagccctccctgctgccactagttacagtggtccatgttccctttcaaagtgaagttttgataaaagcacctcttaaccaatgccaaatagctaagtctgggacaaagattgcaggtattttgcattttccatgtaacctcagagggattgccattcacactgatctgagctgcagaataccaggcagccacctcacccacccagcaggtccactcttatactttctcagaaagcacagccactctactcttattcagttgaaaagaatttccaggaaggtgtttctgcgattgcctcagaaaagtcagttccctttgggaatttcccttagggatcatctgtaactccatttctgccttttacctgaattctttggtttggtttgaattctttggtttaatttatgaattccctttattacttttctctgaagaaatggagatatcagctgtccctccccactgccatttattccttccttcattcaaaccttatgtggctgctacttaccgtgtgttaagtgttcactttttttcttggaattcaaaaaaagaaggacagtatttggggcacagatcttttggtgttctatacatttttttaaagtttcattttacatttgtgtgtgcgtgtgtgtgtgtgtgtgagacagtcttgctctgttgcccaggctggagtgcagtggcataatcattggctcactgtagcctcaaagtcctgggcccaagcaatcttcccacctcagccacccaaaatgctggggttacaggtttatgccactctgtctgacctgaaagttttgggtttactttcccttctttctctttgctgaagtcagagatgatggcagcttccagattctctggtgcctgtgctgggctcgtgctggtcatggtcttgggtccaggattcattctggagactctcagggaagtttcccatgacaaggaaatgtaggagagtgtgctggctttgcgtgctcctctgccaagccctgcttctcctggtgggacacactgaaccacagccagggcattttggtggttagttaaaaaaaaaaaaaaaaaaaaaaaaaggaagaagaaggcactgtgtaattgtgccggggatcttcagaaattgtaatgatgaaagagtgcaagctctcacttccccttcctgtacagggcaggttgtgcagctggaggcagagcagtcctctctggggagcctgaagcaaacatggatcaagaaactgtaggcaatgttgtcctgttggccatcgtcaccctcatcagcgtggtccagaatggtaaggaaagcccttcactcagggaagaacagaaggggagattttctttgatggttgtttggaagtcaggcttaaacaattgtgtctgtgtgtgcgcatgcacaaacacttttaccttatctttattttcttctttttatttgaatgtatagggttgtgtgtatttctgtgtaaatttggggttttcctcctcttagtctttcacttttgtggtgattaccagtcccatttttagagccagggctgcaacttgaaggttttgctaaaaccctcaccgaagtgtctatgatcagcattttaactattaattaatgtggccaggcaaggggtggaaggtgagaagactagaaagggaacatgatatacacatttactcagatactgggcttttctaacatctgcagtgcaattgaagttaccagtcatctgcagtctaaaaagaaagtgattttgggaggtgcgtagaaaaaatcatcttattatttttcctctatattacttttttctttttttctcctgaagaaacttttttttttggtgataccttctttttctctagcacgtataattttggaagcatttttcatatgcagtgtatacttcagaaagagagagagagagaggaaaattgtcctgttcagcgtttgcatttccattattcctgctattagttaaaaacaacaacaacaacaaaaaacaagcaggatacctagatctggaaaagggagaattgtgtagagctgtcttcctaaagttctgagttagggctgcctcagaccactttcataactatctccagtggctttgtgttttatatttattaagatagagaaaaaaagagtaattactaagggcagctgctgtagctttatggtgattactgaacattgacatgctgtcacgtttttggaactttgagtatttaatcactttgggatattctattttcccccatcttgagtgtggacagatgctggtgatgtagccttctgggcacagagcaagcctccccctcagcctctgcaccagaaaggctcagcttcacacactccaagtatgttttctacaagaactacactttgtggctttctgacccaaacatttttatactaaattacacacaacaaagttgtagctcagagagggaacaaatggcttatttaggccaccattttcttgagccattatgatttcacacagggctcccttggccctgtaaattggcaaggattccattattcaacccgcatacatgtacagagaccctgctctggcccagatagtattctgggtacaggcggatagagcaggaaacaaaacagctacagtgatggacaggtcagcctgcagcaatgcctgcagtctctgcaaaggtagctgtatgggtgggcaggtggctagcacttattcagctctggaaggatctcccctctggcctctcccctgacacccatcaataaaactgaggagcatcggtggacaggggaccttgtgccccctccctgcctgtgcagttggggctgaacccagctacgaagtttgagctcactctctccagctccctctcaattcagagctgaactgtgggaagcttcagagctctctgtttcaaggacaggttctcctcacctctcctaatggaggtgcaccagggaactggccctgctctgcccagggctttctcctggactttgccatcatggtctagcaaaccctgttcagattgaggtgagtggtgagatttcgaattctttttgacagataggattaagtcttcttctgtgggacaagtgggaggtagaggtaagattaaagatggccaaatgtctgagtcctgacagccacaatatggagatctagactttttacagaccacagggcacaggggcctcactaacagagttcccggaagtgatgagtgtgctgggggcttcctggttgaagagacactagaatggaccagctgggagctaattttttgggctggagtgtgatggcctgcacatcactgcctctgtccctccattgtcacagctgccccttaggagccagctgaggcaatttgtggtcagagtgactttgcacagttgtcctgcctgtgttcaggaagggagtttctgtggtccctttgaaaccacagaagagcccctcgtatagctctcaatggagggggcaaaacattcaaataactcaggagataacacaactatttgtttttaactgtgagtttttaggcaatcacaaagatccagatgtatgtccaagcctctctttgcaattctaattaacctcaatgttgcaaccatagacctaccttacagagttcaaaaaaatatgcaaaaaccctgcctttcttcttcctcataccccaaaatgccattctgaacatttcctgttagttaaaaaaagatttccatggtgttaccaggcactgtacacagtctgtgtcccaagacaaggaggtacagttccacatgcgcccatgactgggttgggctctgcactctctctatactttgagagcctgattttctgtgattgggcagagctggcccacctggtgcaatgtcctcctctgcctttcaaacatgttttagtcatcaagatcttcaaatttgtaaccctttccagcttgatccagcagaatgcagatttggaaaaacagaacgagtttaaaatacatgattctaagaaacctggaccagaactatcaaaacttggtttcccagagaatatagcaaatgggctcattggccaatactatgacattggcttttgagaaaagaaaggctttattgcaaggctggccagcaaggagacaggagttgggctcaaatctgtctccccagtttggggcttagggcaagttttaattacacagacgcatttcttatgagtagcaggcagagagcctccaacttcttctgcctaggtaccagcagcttagacatgatgcaaacctgggaagcacatactgtatttggagaaagtgattgggaagaaatgtgagctgaggggaggggctcagtgcccctgagctacacttagtgatggcagaggaaggatgtcctcccgcaggaggctgttccacatctgctctggttgtagggggagctggcaggcattagcagcggcctctttcccccaagagaggcagcctcctccaagttttggcgacattatggccctgcaatcataagggtttgtgagcatagtgctaaggagggaaatggagctgctgttactagttccaccccaacacacacacacacactcacaagaaacctcacaagcaccgtattggaagactttgccatccaacctgggatttgacaggctctagaagcagaatcatagactcatgaagttcccccaaagcaggaatcttccttacagtaacccccaaccacccccctccaccgcctccaccggctgcttcttcctgaacactgcagtgtttggaaaactcacaaacttccaagcttgcctttcctattgttgcatggattgaaagcttgcgttgtgtgaagaatggcgcttcctgctgtgcttagttttatctcatataatctttgcaccatttaatccttgcactcacccactcatgcaactgcctttgcagagactggaggggccgctgtaggctgacctttccttcactgtacctattttgttccctgctttattcccctgcacccaggacactgcctggcacaaagacaggtctttataagtgtatgcaagtgaataaagatatatatattattattgttatttttgagacagtttcactctgtcacccaggctggagtgcagtagcgcaatctcagctgactgcaacctctgcctcccaggctcaagtgattctcatgtctcagcctcctgagtagctaggactacaagcatgtgccaccacgcccagctaatttttgtatttttagtaaggacagggtttcaccatgttggccaggttggcctccaactcctgacctcaagtcatcctcctgcctcgacctcccaaagtgctgggattacaggcatgaaaccagcctagaaatacatactattatttattcttgttttacagataagcaaagtgagtcatggagaatttggttgaaagtcccaaggtcaggagtcgtgaagctgggattaaaacctaatcatctgactttagagagtagacacttgctccatgcatattgcctccaattcattcattcaagcactccctgctcaagaagttctttcttatgttgagctgaaatctgcagccctatgcgttttacccagcagtcctggtgctgttccctaaaatcacttagactgtgcctgctctttctgtgtttacagtgtcagctgtaatatccccctcttcggcctaacgtttctgaagtcccttgccactgggtctcctctcctcttcctgtgttctttctaagaacacctatgcagataggtgtcttctgtacagggaagctgttcctgagatccgggcatcgactctgttagaataatctacgtatgagttatttttttgagaactatgtgtcattgctgactcatattaactctgtggttaactaaaatctcaagatctctttatgtttgttgagaaacttatttaacttctctggccctccgtttccttcactgagcagtggagtgattgataacctccacctgtggttgctgaaggtcttgcacaagatgatatagttaaagtagctagcagtgcccacgtacggcggatgcctcacaacggtttgcagccatctctctatctgtgtctttgtctctctctcacactggttttggcttactgttagcagctagccgagataagtgtgtttatggtctttgcatgtattgtttctgtagcatactggaggattacaagaggttggggagtgagggggcggtgaggagtagacaaaggcagccaactcttccaagtttagcttagaaggaaggagcggtaaaccctagttgaatgttggactgaagcaggtttgtttttgttttgtttaaaggatagggaagatctgtgcgtgtttccaggataaagaaaaggagagaatatgatattaaagattctggaagtgggagaaggagcaatgaaatacagacttgaagtcagtggcatggacagggtcaagatcacagttagaggatgcagccttagagaaaaggaaggggctcggttctctgagcaaggagggaaagaagagaggcagatgcagagaagtacggcacatcgtgctgctggttgtagaaataacctctgacttttaataaagtcatccctcggtatccctgggggattagttctatgacctccctcggatgccaaaattcgtggatgctcaagtccctgatataaaatggcatagtatttgcatttaacctacacacatcctccatatcctttttttttttttttttttttttttttttttttttgtgagatggagtcttgctctgtcgccctggctggagtacagtggctcgatcttggctcactgcaagctccgcctcccgggttcatgccattctcctgcctcagcctacaggtgcctgccaccacgcccagctaattttttttttgtattttttagtagagacagggtttcaccatgttagccaggatggtctcgacacatcctccatatactttaagtaacctctagataatctctagattacttgttttgtcttttttttttttttttctttttgagatggagtttcactcttgtcacccaggctggagtgcaatggtgcaatctcagttcactgcaacctccgcctcctgggttcaagcaattctcctgtctcagcctcctgtgtagctaggattacaggcccctccccacccccaccccccaacaactggctaatttttgtatttttagtagagatggggtgtcaccacgttggcctggctggtcttgaactcctgacctcaggtgatctacccgcttcagcctcccaaagtgatgggattataggcatgagccactgtgtgtggcctagattacttataatacctgatagaatgtaaatgctatgtaaacagttgttatactgtattgttaaaagacagtaacaagaaaaaaaatctgtacatgttcagtccagacaaatggttttctgttttttttttttttttttaatatttttggtcagtggttggttgactccaggaatgcagaacccgcagatatagaaggttgattatgcgttcagaggcagggaataccatcttgggttccagaaagaaaatgatcagcattttctgtcatactctggtaaaaacagatcttttgaatggacaggtgtattaaaccctgtggagctggctgggcctggcggctcacgcctgtaatcccagcactttgggaggctgaggcaggtggatcacgaggtcaggagttcgagaccagcctggccaatatggtgaaaccccaactctactaaaaatacaaaaattagccgggcgtgatgacgcatgcctgtagtcccagctactcgggaggctgaggcagaagaatcgcttgaaccctggaggtggaggttgcagtgagccgagatcacgccactgcactccagcctgggcaacagagtgagactccgtatctaaaaaaaaaaaacaaaaacctgtggagctgatgaaatcctgcagggagcttcacggtgacagcaagaggagaaacacatccccatatgccccgcagagtttgaagtcccggctgcacctctccccagcagcaggttgactctggaaagttgcagcgttcttacctacagagtgggaacagtactacccattgcacagagtgggtgcaaagctctgtgacggaatacatggcaagtgcccaccacattgcctgggatgaggtgggcccttcctttacgtaagagagccctacagatacactcaaagtgggcacattcctacagaaggagtgttatttgtgtagaaaagaaaaacatgaaaggcttttattcctatacacaataaagcacccctttaatgtctttttgaggaggataatatgaaattgatgaaaaggaaccctgtggttggatccctgacaatcacatgtatcccttttttcactcttgaaaaaggagtaaaggaataaaatagaaggggagagggggcagagagaccttcaccgccccccccccaccccccatcatccaatctatagtcaaaccctccagactgtgtctccttggcatctctgacacccccaccgccaccaccccagtcaattcctatcttatccccctatcctggatctgattctgctaagttcctgccacactaaagacagggtggctttctgatgacaacattcctctgcttaaacctgtcagtaattccttgttgctctcagacggaactaagttctgaatttcttcacacggctctcagcaaggtcacagtcaccctgctaggccccaggggcaaatctcaatggtcatcttcttgaagacctggctcagttatttctttctcattgaggctcacgaccccaccttcttgcatgcctcaaacggccccttaccatgctcttctttcgcccatagctcagcacaccatatcattttaatttatgtattttgcttaatgtggatgatctgtctcctcctctgctgtcctcaccagagcatcagttcctcaaaccaaggctctttgttttgttcttggatgcaagctaaatgtctggcatgtggcaaatggtcatagatacatgtcattgaaagaatgattcatcacctccctctttggccttgtctgtggttctaccaaatcccattccctccccagtgccctccattccccctccttggctgaacattctgaaccacagacagttctttaccctgaacctttgcatattttgttctcttagcttagagcggcccctctccctccgtctgcttggctaatttctacttgttcttcagattttatcttagatgtcattccctcaaggaatccttctgtgactcaacatggaattaagttgcctcctttgaccctgaaagcaccatgtactcaatctcatcttggcatgactcactttgctgtgtggaatgtctgctttccttgtttgtctattcctttagactgtaagatcctagaaagtgggggccgtgccttgctcatgactgtgtttctaacaccaaacacagtgttcagtagagagcagctgctgagtacgtttctgctaaatgacagttgatggaggacatttagggttgcttggaggtcaagtcaaggaggcatttaacattctagtaaaacaaggaagtaacaggctcctgaacatgcccacaatgaaccagatgcaaaccttttcccttggcaggattctttgcccataaagtggagcacgaaagcaggacccagaatgggaggagcttccagaggaccggaacacttgcctttgagcgggtctacactgccaagtgagtcctaaccctgatgttgctaataagtgggggcatgggcaggggggcctccttctaggagtgatgaccacccttaataccacatgtctgtctgagccaagtttctgagcgccagggaggtgaggaaggttggacttcaccagagaggctttgtggacaccctttatcatcttagtgagtgctagtgtcaaaacaaagggagtggggatatggggcacattggtggagggaggtgtgatctctgcagcttcagaaagatctgaaagagtcatttggttagagaagttgacctatttcctgtggggttagaccagggttgctactgtgaacaccagccatgactcaccagtcaccttcagaagccacaggcaggacatgctgacgacagccttcaactcacccaccccttgctcccctgcgggtggaagtctggaggtgacaccactgcattttctaacacgggggctccttgagcaactagaacaagaacagaaagaatggggacattagcaggtgctttccccctctctcattcttttctttgaataaaaaggttgtttgaaaacacctgagcggctcctaaagatgggtgcaatctattcgggatgcaaatccgaatgaatgttattcaaatgctcctctcttctttatgcagagtgtatttcaaggctcagccagtggcaggcatgctggggactatggactacggactaggggcctgtcacagaggaaggcctcatgctagagagctaagggaggagctggccttcagttccatcccaggagcaactttgatgttcccagagatccttccaaagggggagtcatggtcacccaagaaaaatgtattcagaatgccaagaatggtgcaaactcaggacaaagattcacactgcagggttggagtccctgggcttgctgctggcaccatgggagggagggtccccttcaggggtaccgttggtttcctgtgaattaaactggcttcaagggatctcgactgaacaggcctatatcacactcactgatatactctctcttcagtccttctcctcatctaggtatttttaattgtttcagtgaggtgtaggcatgaggggattggagggggcatctcctccattgcagtttttcattggctgctttgctccctcagctccgaaatcgctgggccactctcgaacgcattagtacggtagtcacaggttgattgcctggccccttgccctctgtgggcattttccctttcagacagcccctgagtactcacagtgctgctacagtgggccacctagatctccctctttctccatgctcccacgtgctctgggctccactcccttctcccaagcacttctgtccagggctattccagcagtctgacctcaaggaaatcctttgctaaactgattatagagaggtttctattttaacatttaggtcttccatgtattaattctcagaatcaatttaagatgtttaaaggtgtgatttaagacattttaaaaccatttggaggagagtacagaaattatgtcacttgctgtcagcctctttgcaccatctgcagagaaagatactagagtcccgccttggacacatccacatgcaagaggtgcaaagaaggtgtctttgatgaggcaaggtcaaaacttctccccagacgaaatccaaagaaagcattcctactatgctatatcagtttggaaagaaaaacttctgccaggtgactgcattctcactggtcacattgtgttcctatggactcctcagctcaaccaatttggagaagttatggtgcaatttcaccatatctggttagaagttaagtttccaatttgctggcaatgaagaagaaatggagcaggccaggctgtgtagtttctgccacgtgcccccgggagtgaacagctctgtttgtaagaagccatggtgcttagacctgggctcgctagttgccagcctccaaattgcagaagtgccctttggttggtggctatgctgtgtcacttgggaaggtcgtttggaagttccacagtcgttgtggggtgccagagattaaaaagcgtaagaggagagtggaaagtgattgttgctgcttgggcatccccaccgtgtgggtgctgcagcccagctctcaaaacccatgggtctgtacactcaacctccatgagagggaaggagaaggatgagggaggggagagatagccatggaaaggtaggaactaagcaggcagggtggagagttttctgtaagacaaaaactgtctggacactgctgcggttctgttacaaagaccacttcctccctgggccagcaacatatctgtgtgcctgtctgggttgtaaaaagggtcaaagatcaatgcagcaggcagctacatgctggcaaaagccagaggcagctggtctgtttgcctgtgccaggaaaccactgggaatggggttgtgtgttattctaggagaaagtcgtcccagcagcagcttctccaggggcatccaagagcactgaaaagggttgcaagatgacccatgaggctgcaggaagaaaagaacatgcatttaatcttgctatctgaaaagtaagacatgaagctttcctcatttttaatatacacatggacagtagtatgtgtatatagtttatatgcaaatatacttgttataaggttgcatgctcaaaatttttggttcatggggtgtgggatcataaatgtttagggaccatggctatcaaggaaaaacagcatgaaggataaatgatactggtggattaaaaagacagatgcatgtatttttagcataaaacacaactgctgactgatacagatagctcaagattctggggcagctgctgaacagatacactagccagtgtggctcatcggctcagacttggccttaattaatgggctgtccctccacccatctcccatgagggcagagctgagccagggtttgagagctaaaaggaattggacctggactctgttcacgtgtatattttaattctaattaattcattcttttgaaagacagagtcacactctgttgcctaggctggagtgcagtggcacgatcttggctcactgcaacctcggcctcccaggttcaagttattctcctgcttcagcctcctgagtagctgggattataggcacatgcccccatgcctgactaatttttgtatttttagtagagacggggtttcaccatgtcaggctggtcttgaactcctgacctcaggttatccacccgccttggcccctcaaagtgttggaattacaggtgtgagccaccgtgcctggcctgttcacatgtataaaacacagtttaatgtcctattcccagccaatgagcatggctagagcagccttggtcaaagtttggtttttggagaaaaatccttgttagctgacctaagattcctctttgtgagtgtaagtaagcacaggttgcagagaggagaagggtctctggagaggtgtaattttctaaatggattacaagttcatggacttttaacaggtgttacaggggataacaagttctttatagacagacttttgaggacgtttaagggtattctgattcttggttttctaagaggggaatgtattatttaactacagacacccctaccgcccactttttgcagagtgtatcaaaacatgtttttggaataccaccctcatgtcgcttctccctgcatctcttatctcttggtgtccattctagactcactttctttctgttttttatttttatttttttttgagatggagcttcactctgtcaccaggctggagtgcagtggtgcaatcttggctgactgcaacctctgccttccgggcttaagcaatttttgtgcctcagcctcctgagtagctgggattacagcatgcaccaccatgtccggctaatttttgtatctttagtagagacagggtttcactatgctggccagcctggtctcaaactccttacctcaggtgatctgcccgcctcggcctcccagagtgctcagattacagacgtgagccactggtgcctggcctagactcactttcaagtggcatagacttgtaaaattatttaaaggtgataggtctacaatgatcctgtcaattagtattgacactattattaataaactgttattaattatatttacttactttaaattaatccaaactaattaacggaacactaaagagtttctatgttttattcccagaggtggagaaaaatgaaagggaatatagcaacgaattcttttctccataaaaacatgaatagtgcagcacatcaagttgaacataccacagcaaattgttgcaagatctgctgagtagctcctatttagacctcaaggaatgagactcaaaatgggttcatcagttctgttttgcagaaaaaatagcgcaaaatttctcaaaagaaaatccagaataataataatttgtcaataggaaagacatttccactgggggttaagaaggaagacattggaacaatgatagccaccacttattgaatgcttactgtgagccaggtggcacttcaccttgtttcattctcacaacagtctagggaagtaattactaatgtctccatccacctcttgtagatgagcaaactgaggctcattgaggctaggaaatgcacccacactcacatagcccataagaggcagccatggcattgggcccagaccatgtgaacttcaaagactacacgagcagccactgggcagctgtcatggctaaagccacttgaattcagcccagcagcaaccccctctccaggaggggcacataagcttgcagctttgggtagaagctgcacttgaagtcctggatggcgagagggactggcttgagccagagccaggaacaaggctctgagaatattctggaaatccacaggaggaacccattttcttacagctgggagaatttcattcaactccaggctgaccatgttttattaggaacgaaggtgacttgaactaatagtcaggaatggttgaatacggacccaatgtcaaatcactaggcagttcacatttctaatgagcaaatcccttagacaattaagaatttttttccttttgcataacccagacaaaatcgctacttaaaaacaaaccaaagacccgaaacatgagaaagagaaggaagcaggggaaatctttggtactaataagtttttaaacaataagagcaccagatattttaccccatcagacacagaatgttattcgaataaccaaaaaaggaattttttctctaagtttcttgaactggaaaatgaatcatattttctcagtcctgaggctgcaattttgtgcctctagtaacatataagaatagatgtgatgccagtgcccagtagctgctgcaattgttacttggggacctgtttattcactaagcacttcaccccagtgataaatttgtaggggcctcctgccctttggagctcctaccgtgtccattagatcagtggaaattctgggattcagagcactttgcaaggtcagcaggggtctgctctttctgtcctgttcctggtttttggttgtgcctggattccagggtaggtttctcatctgttaccttcatagacttctccagaaaaggatcttttgaccatcagaggaccacgaagattccattggtgaggcgcagataacctgatctctctgggttctctgcagggcacagatgaagggctggccattcccaagttctcagtggtaccactgaggcatgagaccctaatggtttgcatgagcagtttgaaaattgcatctttgtttttacctatataatcacatgaaacccgtggttctcaaacgtcagcaggcatcagcatcacatggagggcttgttaaaacagatttctgggccccaacacagagttttaaattctgaaggcctgaggtgggtgtgaacatttgcatttctaacatgttctcgatgctgctgccgcctctggtcccgagagcatgcctggagaactgccaccttcgaccatggactgtgagaattcacatggacctcagaattataatcagtctctcagttttacagataaggaaactaaatccagagagattgttttgccaatggtgaacagctggttaaagtcaggatggagactttaatcctagtcaagtgacctttcctctgtatttatttccctccctttttatgcctctcaagtctagttacactgtttttcatggatgggcatatttattgtcctgatctggactgcagacttctcaggaggacacctatgatttaatttagtatagttgaagagttaacagacatggctttggagacagactgattatggtgtgaatcccggctttgccactccctagctggatgaccctgagcaagttattcagcttctccaagcctgagttccttattggaaacatgagagcaattgtgataggcagaataatggccccctcaccaatcatgcccacatcctaatcctaggaacctgtgaatatgttatgttacatggcaaggggaaattcaggcagctagccagttggccttaaaataaagagattatcctggatgatctgggtaggacctgatgtaaccacaagggtctttttaatgtggaagaaggaggcataagagtagatgtcagagtcattcaaaataagaaagatttgatgggccatccctgactttcaggttggaaggaggttctgagtcaaggaatacaggtgacctctagaagctggagaaggcaaggaaatggtttctcccctagaagttccagaaggattgcagccctgctaatatcttgactttatagccctttgagatttattttggatttctgacatcctgaaccatagtaaaagggtgttttttgtttttttgagacagagtcttgctctgttgcctgggctggagtgcagtggtgtgatcttggctcgctgcaacctccgcctcccaggttcaagtgattctcctgcctcagcctcctgagtagctgggattacaggtgcttgccaccacacctggctattttttgtgtttttagtagagacagggtttcaccatgttggccaggctggtcttgaactcctgaccttgtgatctgcctgcctcagcctcccaaattgctgggattacaaggcgtgttgttttaagccactcagtttgtggccacttgttacagcagcaagaggaaactcatacagttatcatgtgaactcacaggaatatggtgagttaaaaagagaggaagggtgcaaaacatccacggtagagtgagaactctccagggagtgaggactgtgcccagcatacagtgatcaccctcttagtaagctaagtttctgagcaccagcttttttgagttgactttgttgtctttaacatttgaagatcacccttctttgctcagcctggcttgcagacctgggctgatttgtggatctgatagaaaagtttccttagttgggctcttctccccgaccacccccatgccagtgtggccacatcctctgtctgcattgctcactcttcaattccaagaagcgcaggggcaccgccaggaacaggaaccctgccagaggaatacatcaagaaaccaagtctcccttacgcatcaccgtaggaacagagttaatggattatgaacatgtgtttgctttataccattgtttgtttcccaggtggcagctggctgccccatcttattgggtagatgtaagtggaattacgaatgggatttatgtttcatgcacgatggtgattattaacttcaactttcaggtaattttcagaccacattgcactaacttggtctctgattgtttttctccttgtttgtttattctgcagccagaactgtgtagatgcgtaccccactttcctcgctgtgctctggtctgcggggctactttgcagccaaggtaactcagacttccctttgttcattctccttctataaagtgcatctcaaggaggttcaaagggcaggctttttgttgaaaggactttgcctgacctctggctcccatctgtgaagccctggagaggtgagagccctcgggaggccgtgtttcaggcatgctctgcacccgtgcagagcgcgtgtgataatgcattgctaatgcttgctccctggtggctggctgagagctgctgtgctgacaagggtggtttaaggctaaatgtgactcagaatccttaagcagtgttagttcagatacaagggcattataaatgagagtgcctgagggatctattttgggaccgctgtcacttggctcttctgctaataagcttccagtgtggtggccctccttcaggcatgtttccactgagccacgggctggatgccacatccccggccttcccacagttatcagcagcccacaggcttgacttgagcaagttggaaagacaaatcaacttccagagttgatttaacattgagtggaaatcagtcatacttttggtcccctttcggggccacgcctggcactgtgcctggtggcagatcggcatgaactggccagcttctgtggccctggagggcacaggcagaaaggccacactcagtcccatgatgaactgtttaagacttattgttgtctccccgctctgtaaagtagatagagtggattttatgtcccttattacctttcaggatactttgactcagggagataaagtaacttgggtacagctactcagctggtgaagaacacaggcagaatgagtgcctgggtcttttgacttaaaattctggatttttcacaaagatcctcttactttattcatttacataataaatatatattgaagagctactctgtgccaagccctgtgcctagatatacagtgataaataaagagtagcttctagaggtcacctggcggtgaggcacaggccagctggcaagatggaccacagaagtcagtgaatgaagacaatgacaagggtgggaagcgccatatgggaagagaaccaagttcagtgatagagagcagaggtgaggcggcagcagaaaccacttaagggacaccacgtggcactccttctgtgctgagaaggctgtcagtaagctcaccatttatttcctattttctctcctgagttaaataggaaacatgtctcgcattacttgaaaaatcaagtcaaactatgctcttactaggagttatggttctttttatgtcttagatgatgcttgatctagatgaatgcggacttgctgtagctagataaatacaatgggagtttgaaggtgtttcgtagccctggaaataggtatttcctgtcaaaacaagctttgtcattgccagcagacaaaagcatcagtaaccttggttgataatcgtcatttcttaggaataaagtagactgtagaattttttttagcagaaaggaaacccaaagataattctagtgcaaatccctcactttatagagcagaagctcaagtcccagaggaacaagtggcttgaacgaacatcagaattttaggggctggatttgtaccctcctggtgccagcagcccacttccctgcaggaggcactcaccttccttgcacaggggtatgagtgtggccattttccacccataatctctgttagctcatgttcaattgggttcccattgaaagaaaaatggaccagtaagttggagcagaatcattcagatggtataacataaggaaaaactttgcccaaggcaaatcgtgattgtgacagctttgtgatttttagagaatagcatgggccaggcacagtggctcatgcctgtaatcccagcactttgggaggccgaggcaggcaggtcacttgaggttgggagttcgacaacagcctgaccaacatggagaaaccctgtctctactaaaaatacaaaattagctgggcgtggtggtgcatgcctgtaatgccagctactcgggaggctgaggcaggagaatcacttaaacctgggaggcggaggttgcggtgaaccaagatagcaccattgcactccagcctgggcaacaagagtgaaactccgtctcaaaaagagttcacagtttctcttttgctttgattttcttatctgccggataacaatagtattttggaaggcaggaggaattgtggaaagaaatgggttttggggagtggctgattggaggcaaatccaaggacactcattgctggtgtgtgactccaggcagttactcagcttttccaagcctcagtttccttattgtaaaacaggaccatggtctagctagtagcattcctatggtgagtgaaataatatgtataaagctcctgacacagtgcttggcatatatcagattgagccatgtaaaactgccaatatctggctatttatgacctacaaaaatagcatttcatatgattccacctaacatctgaagcgcaataaatgttattattgataatgcaggtggtggtgataaagttttgaaatcagaaagacctggcttcaaattccacgccttcactggcctgacttattttcattcatttgacaaatattattttgaacacccctatgtgccaggcactatgccaggctcagagatgatctaggaaaaagacagatgtcctcatctgtcttaggctcttgtggcctaagcctaaatttcctcgtctgtcaaatggtgacagtaacacactccttaccagagagctgggaggattggagactcaagttcccaaaacgccaggagcactgcggcaggtgaaaagtattccctcaatggcggaagtgtttaaattgcttttatatctgtagctctagataacactagttccagcttagttaactcccagctccaagccttcaggacttcatagagttattggggtgctgctcttggcagtttcccaaaaagctagaatgcagagggaatctccttcccaaaaagctagaatgcagagggaatctccttcccaaaaggctagaacgcagagggaatctccttcccaaaaggctagaacgcagagggaatctccttcccaaaaggctagaatgcagagggaatgtccttctcttctaaatggtagctgttagttcaagaaaggttaaacattgtgctgtggggaggctcaggggtgaagggtgtacttttaagagaaccagtttcagagctgggtttggggtttaagccctaccctctgcccccttttacgagctgacagccttatgcaagcctggttgaccacctgaacccacgtttccacatctggaaatagaaatgtgggtactagttatgttgaaaggactcaggttagatgatagatatgcaaataccttggaaaccaggagtgtccagtcttttgggttccctgagccacactggaagaagagttgtcttgggccacacatagaatacactaaccctatcaatagctgatgagctaaagaaaaaacgttgcaaaaaaaatctcatatttttaagaaagtttatgaatttgtgttgggctgtattcaaagccatcctgggccacgtgcgacccgcaggctccgggttggacaagtttgttgtaaacaatgccatgatgccggcataaggtcgttaccagtattaggaaggttctcaggtttcctctagcccttgggctcttttcctgaagtgcgtgtgtcttctgctagattttgtgaccaatgttgattgcctaattgggctaacagcatgttttggtggctacgaaactgacacaggtgttttcatttctccacttagttcctgctgcgtttgctggactgatgtacttgtttgtgaggcaaaagtactttgtcggttacctaggagagagaacgcagaggtaggtaactgggactactaaagaactgtggagcgattcctgatttttgagcaggaagagtgacaattcaaaacagtatttgactagattcacggctccgtagcatccccttgggtgggagggggaaggctgactaggacctctgattcttctttccctgagctttgaaggctctgaaaatacagctggggggacttgcccagttttcttattaagcaattcctccgcatggtgctggctttcaaagggtgcttcagtgctgtttgctgcacgtgccttgcagccccacaccctgcactcccgccctgcagagtctggcgctggaatgacattttaggtctgggttcccaggcctcctgagagtgaaatgtttcattgtttgtctagagaaatgagaactaaagcttgcaccttgtgataagttgtcctgaggaacatatctttcagggaccagaagaaagaatgttgggaaaataagatgcagtaagatgcagacatgacagcagggtgcagcggctcacgcctataatcccagcactttgggaggctgaggtgggtggatcacctgaggtcaggagtttgagaccagcctggccaacatggtgaaaccccgtctctactaaaaaatatacaaaacattagccaggcatggtggtgggcgcctgtaatcccagctactccataggctgaggctggagaatcgcttgaacccaggaggcagaggttgcagtgagccgagattgcgccactgcactccagcctgggcaacaaaagcaaaactccatctcaaaaaaaaaaaaaaaaaaaaaaaaaaagatgcagacacgagactgtgaaactgactagcatcaccattgcattgtttatagatgttgccagacagaaagccccaaagcagcacagtaccttcctgacatctggactaggaaatctagattttagtaaaatacatgctaatacttacagaagaaatgtcggcgttagagtatgccgtcagttccttagagattgcaattcctaatgcactagtatggtttcaggtgccaggaacacgttctgtgaggctgctgccccaggtgctgaccccagccttccacaccattttccttccttgtgttcacagccgctctgtcttttacaatagcacccctctctagtggctaatgggctctatgattagatagcatccttcagtagtgataaaggcagtgacatcctagggaggtcagcgggtgaaagcgctatatctggaaaacctgagagcctgtgaagctcaaggacttgacggggttagaccgtgagccgggctgcagctggaaaaagaatgactgttctttcagcagatccttccctgtgccatctctttcttcattcctctctagtggcattcttatttatcctctaaaaccacaattccattatctctcctattcttatcaacactgccctaaatgatattctttattctcttttgccctggaaaacctctatcatgccttttcccatgtgattacctcgttaagagtgggggtggaatgtctagcaatgaaataagagggtcttctcttttgcctggctccctatgcagccctatcttaccccctgcaaagtcccagggatgtggctcagtcactgctcctctcttcatctgtcaccacttgcttgagatcctacagctgctttaattccgagaccatctgcagaacatgacaaaatttgtccacctacccacatgtccttttaactttaaaggctttactaactgattcctattagggaatgaacagaggtggcaaaaataaacaataggagattgatttacaagaaatctttaaaatagtagatttcttcggacctcattgaaatataaatggcctgccttcttgtgtccctccctggtctccctctttaggtgataagaagaagatcctgccagccccataacccgccatctgcgcgggttctagacccccttctcctcccctctggccgtggtaggcattactgatgaatcatggtgctctttcttccagagaccaaacctggcctcggaatccttcttaacacagatactgcttaacacaaccactctgagcagctgtcataagtagaagtaatagatactagaagaaatgtctaagcctaatctagaccaaaatacggcctgatatagatgcaagccagaggggctttatggttaaatgcaaggagattttcaaccctgccgtctagaagctacttgctgagatcttcttcagttgggcccatctcctccccaggcctctcttctgttcctgggctatgtcacacttggactctgcagacacctaatgctcttgggacctgctttagttcttgacctcaccaaccgaggaggaattgctagatgagatccttcccccggaatttctctcttgaaccccagatggtccgttgcccctttccagaagttgctccagccctgtccgcttaggaagttcagtgtcatccttgatccagtgggtagggaagacattccataatgaatgccccagtctgagcttcttccttcaggcttcaggctgccctgcgaggattttgcagctccctttttaatgccctctagaagtttctggctcttattttcagcccttcatcctactctctctgaccccttcctctatcctgtttagttcacctgtagcagttactacccagcagtgaaggatgaatcttggtttcgtttcttttctcttcttttcttttttctcttctcttttccccttcccttcccttccctcccttcacatcacctcatctcacctcaccttacatagtcttgctctgtcacccaaactggagtgcagtggcctgatcttggctcactgcaacctccacctcttcccaggttcaagtgattcttatacctcagcctcttgagtagctgagactacaggtgtgcactaccacacccagctaattttttgtatttttagtagagatagggtttagctatgttggccaggctggtctcgaactgctgaactcaagcaatctgccatccccggcctcccaaagtactgggagtataggcataagccacccatgatgcccagcctgaatcttggtttcttccccattcatttaagctattacctgggcctgaactcaatggcacctggcaccaactggcaactgactcttggtcttttattacctaccttccctagcaggcactgggttgctccctcttcctatcccatggagtcctgtcctctgttggggctcctactgatcctcttggcaatatgaagttctcagctcaatggtgggtgggcaatgactgccaactcttgaggccaatgaactcaggttaccccactcctcctcctcctgagttgctcactcactcctcattcactcaacattgattcagtagatatttgctacctgctctgtgccaggtaccaggtcagttgctgaaggagtaacagtgaacatgacggagtctttgtccccaaggagacccaaggtgtctcctagagccaggggcacattgcaagaccaaatatattcaacttaccaaaataatcatagacctagttctcaaaaagcaagaagactgattcctcgttgtcatttctcctcctcagcatcaatgttttagagtctgtgggcccctccaagtgtggagtatggtgttacttcaccagagtttgaggagaaacattcttcttttggaaggccggggagcatagatggatatcaaggctgctgtttctaaaagcgaaacccaccaaacaacagtattagaatcatctgtggtgcttattaaagatacagattcctgggccccatcccagacttatgaatcagaatctctgccagaggaagcctgagaatttgcattctcagatgattctgcattctcagataacacattctttaggtgattcttacacacactggagtttgggaatcgctgaaggctgttcacttctcttttctgagaaatgattcattcatttcagaaatatttgcagaggtccttatttattggagatttgtgggtgggcagaggagaaatatcttgtcctcacagagcttacaatttttattttctttagaggtcaccaggcttaaaatgacacttccctaaattctgaaaagaacagatttttaaaacaagaagggactgtaatgttttctgttcctacctcgtattttgttcacattaagaacctggggtgggaagtggaggagggggggtgactggcggggggccacagagagctgagctggggtggtctcgaactcctgaactcaagcaatctgccagcctcagtctcccaaagtgctgggattataggcatgagccacccacgatgcctgggtggaactcagggctctggatgcctgggcgcccccatctcccacactacggcgcctcatcctagaagtggttagcacctttgagatgggaattatttagcaggatgcttttgtgttttcatgtaagttttatgctgcctgtggagggcacagctgtttcaaaactaataaccaaatcctggtctccgaagtctgaaggcatcctttgccctgcagtgcaaagcacgggattctggcctcacacaggcaggtctgaactcctgtgttgcctcttgctggctgtgggacctgaggcaaatcatgcaacctctcttttctgtttgcctagatggaaaataggtttacaatacgcccccataggatggctgtgagaattaaaggaagtcatgggtgtacaatacctggccccgaaagatgcttaataatttaattctgaccttcctcactcatttaggattatgtaccaacttttagaaacaatgaaagattagtgagtcttctgtggttggtataaaaaaaaaatagaaacatgaaagagatgtcctccttgttcaagggctaatgaccctggtgtgcgctgtctaggcccccaaggtcttccttccctgctcacagcatttcaggttctccgcagctttgctgagcctgggtcaggttcggtatctgcccaccatgctcacttgccacagctgtggccccatttccaaacttcagagacttaaaggtgcagctaatgatgtgcccggcctggggtcacattccctgagccctgcagacaagggagcaggaggctgagctcttatcttccacaccctgtgcacagcctgggaagagttaaagcaccctagtcctatgctgcgagggccacatgccctgagaccttggaaaaaatcctacctgaattgaagagcatcactatttcatcaggaggcgctgccatttcatttttcacttcggttttatcttgagtgtaaaacagcttcgcaaatcactttttcttgtttctgtaatgagcatatggtggcctcattcgtgtgataaatctgagccaccacgatatttgacttttcacaatttaatttatctgaaccctctattctctggctaaaaaatatcccttacttggacttctttattttattttcaattcccttaccagcactagcaggggactctgtactcatctgctggcgctgccataacaaagcactgcagcctggggggctcaaaccacagaatttattctctcacagtcctagaggctagaagtccaagatcaaagtgtgggcagggtcggtttctcctgcagcctctctccttggcttatagagtgccaccttctacctgtgtcttcacatcatcacctcactgagcatgtctgtgtccaaatctccccttcttataagaccccagtcatactggatgaggatccacccatatgagttcattttaccttaattatctctttaaacaccctgtctccaaatacagtcccattctgaggaactgagagtaaagattcaacatatgaattttggaagggacctaattcagcccacaacaccctcttttgggatgtttattttcccccttaaggagctagttaggatgtcttatctcatgaacatgactgtgaacaggaaaacagggagagaatgaagctggccaaggaacagggctggtgtcagctagcagtgcttttctgatgtgagtgggtcccacagggagcttgttaaaatgcagattctgattcattaggttccagagggacctgagatttcccatttctgacaagtttccagtgtgggggctgatgctgctggtccacggaccatactttgagtagcaaggagcttgatacataatggctgagtgactttcagactcctgctgtagaaaaattatgagttggctgggcgtggtggctcacgcctgtaatcccagcactttgggaggccgaggtgggcagatcacctgaggtcaggagttcgagaccagcctggccaacatggtgaaacaccatctctaccaaaaatacaaaaattagccaggtgtggtggcaggtgcctgtaatcccagctactcaggaggctgaggcaggagaatcgcttgaacccgggaggcagaggttgcagtgatctgagatcgtgccactgcactccagctgggcaatagagcttgactcagtctcaaaaaaaaaaaaagaaaagaaaaagaaaaattatgagttatattatcagcatatggggtgcctttcaaattgataaaatttctaatattaaacctgtggatgccaaatgctgctctctgattatggcaggaaacggcacttggcagtacgaagttagctgttgggctgagctggctcatcttgttgtgcggtcctgattgcctaaagatgccttcccaggatctttactaacaatcctcctgagtcatttggactttcccaacctgttatcacctctcagatgggccagccatggaggcagtcagaggagggctctgcagagggagggcagaaacagggtggcctctgcatgccattaggaggtcacatctcactgggggatgcagtttaggatttagtgccttggagagaaggatagagtatattaaaacatgtctccgctaggcatggtggtttacgcctataatcccagcactttgggaggccgaggtgagtggattgcctgagctcaggagttcaagaccagcctggctaacatgacgaaacctcatctctactaaaatacaaaaagttagctgggagtggtggcgtgcgcctgtagttgcagctacttgggaggctgaggcatgagaatcacttaagcccagaagactgaggttgcagtgagccgagattgcaccactgcactccagcttgggctacagagtgagactctatctcaaaaacaaagaaacaaacaacaacaataacaacaaaaaccaagtctctccctccactcaaaaatgcaagggcctgtctcccattgctgggtgcccaggtctcatgaatgtagatatgaattattccagtcagcctcaggagaatagaatgagccctcagatgccgaagcacctttcagattccaccggttttatcggctcatttaaacttcacttctaacacagtcctgcattacacacgtgtctgtcgttatgggcagctgcagagagggtcttaatggtcctaatgctcagtgaggatgcccaatggtcaacagaacctgccatcttcaggccatcaaggagctctggagttaaggaaatcatgagagcacagaggggcgggtacagcagagccctcgtggtaatgggttttgaggtctaggctctcttcacttgggtttgaaataagttcaatgactagtaatagctgagacacttctacccttcaaatgaagtaaatgggaaaatggagcattgttgagtccagggagctataatttaaaccccatatatctaaaaggggtaacatttttgtgtgtgtgaaattggtgtcattcgcactgcatctacagttttctttttccttctcttccagcacccctggctacatatttgggaaacgcatcatactcttcctgttcctcatgtccgttgctggcatattcaactattacctcatcttctttttcggaagtgactttgaaaactacataaagacgatctccaccaccatctcccctctacttctcattccctaactctctgctgaatatggggttggtgttctcatctaatcaatacctacaagtcatcataattcagctcttgagagcattctgctcttctttagatggctgtaaatctattggccatctgggcttcacagcttgagttaaccttgcttttccgggaacaaaatgatgtcatgtcagctccgccccttgaacatgaccgtggccccaaatttgctattcccatgcattttgtttgtttcttcacttatcctgttctctgaagatgttttgtgaccaggtttgtgttttcttaaaataaaatgcagagacatgttttaagctgatagttgaggggttttgttaatggcttttgggggatttatctctatacccacaaacgactagtttgttttcctcaaactaaatgataatattaaaaatacacatcctggccaggtgtggtggctcatacctgtaatcccagcactttgggaggccgaggcaggtggatcacttgaggtcaggaattaagaccagcctggccaatatggtgaaagcctgtctgtactaaaaatacaaaaattagccaggtatgctggtggatgcttataatcccagctacttgggaggttgaggcaggagaattgcttgaacccgggaggtagaggttgcagtgagccaagatcatgccactgcactccagcttgggcaacagagtgagactccatctcaaattaaaaaaaatacacatctggcttctggaaaaattacttgaagatcttttatgacatccatccctcttcacacagccatgtgaattaggttggtatcttcatatactagcatcgtgcccagcacttccatgttatacagtttaaaatgttctgtaattccctgtgggaacctaagataatgcgaggaccgtcatacgtgcccccaaatattggcaaaccaatgaataaatgaatgaatgagtttatgaatcgctaactggctgtatttaatgaagtatgtgtgttgagccatttcccacagtgtggacagatttgtcccacaatatgggcctcttcccaaaggccctaccacctaatgccatcacactggggatttgatttcaacatgtgaatttggggagagtgcaaacactcagaccatagcaccatctcagtaaatgtcccactggtcactcagttcatagtgacagtgatccagccactgtcatgacaggtgccacttggcagaaacagcacagcttggaagatggcggggtgtagtcaagattccaggatccccaacagagaagccagctcttataggggagccattcatcaggattgaactctcaatcgagctggacagtaataggtgggtctgtgttattccccagatgagtatcatgacagtcacaatcctaggaaggatgtgaagcctcccccagctctcctccagttgcctgcttgggcagcagagatgatggaatgtggagtctggcgtggtctgaggcctgaatccatgtgcctcatgtatgatgctcaggcaagaggatctctcaattcaagggagagggcctgaatgagccttgctttccaggcctgtctgatggtccaggctgaagcccctcctggcttgcactgccagacctcatccagcaggagctccttggcattgactgcttcaggatagttgcttctgctctgagtgctctctaaagagcagtgctctaccatccaagctgggcttttcttttcttcttgctgatagggaaggcatgggacattgcaggatggaagtggcccccaggccttctcatgcctgggcttggtttggaaggtggtcaggtgatcaataatcctgattggcctggcattgaggagttttcctgggatgtggtcctttcggttttttaaaaattatttttattgatacacatatttgtaggtatttgtggggtgcatgtgatactttattatgtgtgtggattgtgtaatgatgaagtcagggcatttagggtcttcatcaccttgattatcatttctatgtgttgagaacatttcaagttctcagttccagctattttgaaatagacagtccattttgttagctacagtcacccaacccggctgtcagacattggaacttactcctattgaactgtgtatttgtacccattcaccaaactctctttgggctttcagttttacaactgggatgatcctgggaaaactaaagtaaatcagacacccgacgtgtgagctaggttataatatgcccagtggaccctggggacatcttagctttcagaggtcatgctgtccaagctgactgtggggcttccagaaggtggggagaggaaatgatgcaatggcccatcagaggcactacttggggcctggggccagagtgcatgtctaaggcattaaggggaggggagagcagccttcataattatgaagaggagtctcaggtgcacagcttctgatgagggacagcttctaattgaagacagcattgtgtaatgctcaaactccctgtcttcagagtgcctgctgtatcccaccatcagttctgtgacttctccctaagcctcaattttgcatgtgttacattgggataataatagtgccaaactcatggggttgtgaggaataatgaggtaaagcaattgaaaaggtttagcacaatataagtgctcaataaaagccattattattattttattacactagttttcaattcctgcatagcaaattcttgcaaatgtagggactcaaaacaatataaatttattatctgacagtttttctgggtcagaggtcttactaggctgtaatcagagggcaaccaaagctgtgatctcagctgaagctcaggattctcttccaagctcactggttgttggcagaattcagttctttccagttggaagactaaagcctacagtcttcagtctctagaagccttttctctggcacaggtttctctacaacatggccatttatgtctttaaggccaataggagaacatgattagcatattttttttaagtgaactttagacccttttttaaaggcctatctgattaggccaggcccaagtgagctttaagtcaactgattagagatcttaattacatctgcaaagtcccttcatgtttaccgtataacataacttagtgaaaggagtgaaattgcaaccaggttctgcctgcactccacggaaggggattctgcagaagtgtgggtcacgggggggttattttgggattctgcctacgtcactgagtcaaaagaagctgaatggttgtgatgctgaggtttttgggcagcagcagtgtgtgtgtgtgagtgaattcatacgtatgaccacctgggaagaaaggaggctgtggtttcctccacctcctggcagacagagaaatttctttttttttttgagacagggtctggctctgttacccaggctggagtgcagtggcttgatctctgctcactggctcactgcagcctctgcctcccaggttcaagtaattcttgtgcctcaactccaagtagctgggattacagacacacactgccacgcctggctaatttttgtatttttagtagagacgaggttttgccatgttggccaggctggtcttgaactcctgacctcaagtgatccgcccacctcagcctcccaaagtgctgggattacagacgtgagccaccattaaccatttttctatctcctgtgggaaagggcacagtgaaagaacagatgaagctgagacatacaagtgaactcctccctcctctccatttagactaaaataggattattcatactgagattctccctggttgcaaagagataatctgtgcaactgggtttttacaattatccctaccctatgctttcctcatctgtcttcctcgtagtcagctcaggctgctataacaaaacaccataactgggggcttttgaacaacaaaactttacttctcacagttctagaggctggaaatccaagatcaagtttctggcagattcggtgtctaatgaggtcctgctttccagtttatagacagtgccttatcgctaccgccttacacagtggaaggagaggacgagaagctccttgggcttttttttgtttctttctttctctctctctctcttttttttttttttaataaggtcactatcttagtccattttgtgttgctaaaaggaacatctgaggttgagtaatttattttattttaaaaagtggccaggcatggaggcttatcctgtaaccctaatcctttaggaggccaaaacagcaggattgtttgaggccaggagttcaagaccagcctaggcaagatagtgagaccccatctaccccatctctactaaaattttaaaaaattagctgtgtgttgtaaagtgtgcttgtagtcccggccacttgagaggctgaggtgggtggagttcaaggctgcagtgagttatgattgagccactgcactccaacccgggtaacggggcaagaccttgtctctatttaaaaaaaaaaaatctttatgtggctcactattctgggtggctggaaagttcaagattgggcatctgcatctggtgacagcctcatgtcgcttccagtcatgggggaagacgaaggagagctggcacgtgcagatatcacgtgttgagggcagaagcgagagagagaggggagagatgccaggctctttttaacaaccagcactggggaaactaatagagtgagagctcactgactcctgagggaggacattaatctattgatgagcgacctgcctccatgacccaaacacctccaacgataccccacctccaacactgccacactagggattaactttcaacttgagatttagaggggggaaacttacaaactatcgcaggcactaataccactcatgagggctccaccttcatgacctaatcacttcctaaaggccttacctcttaatctcatcacattgaggattcgatttcaacttgaattttggggggacaccaacattcaggccatagcatcatctcaataactgtcccattggtggtcactcaggccccaaacaaaggaaccttcctccattcctttccgccctcccacccacagtcaatcatccccaagctccatcagctccacctttaacggccaacccacctctgccacatctcaccatctccactgctatccctgtcacctgggcccaccattctctctcctggacagtctccatagccacctctgtcagatttattttatttttttatttttttttttgagacaggttcctgctctgttgcccagactggagtgccatggcatgatcacatctcactgcggcctccatcacctgggctcaagcaatcctcccatctcagcctcccaagtagctgggactactggcaccaccatacctggctaattttttgttgttgttgtttaatttttaatacagatgaagcctcactatgttgcccaggctgctcttgaactcctgggctcaagtgatcctccggccttggcctcccaaagtgctgggattacaggcatgagccaccgtgcccagcccatcagatgttaatgctacacgcacttgcttaaaatcccccagataattctcgctgctcttggaataattcccacacaccttggcgtggccatgcaggctctgtgccatcggatatgtccctgccccctctcccaactcctcctttcgcttgctcgttcactcagttccagccacattgccctgggagctgctcccaccatggggcttcctaatgcactggtctctctcatgcagtggggcctctccctccttttactcagtgtctcccagcacccacctcctccagagccttccctgaccaccacacctacacctaggcccttcctcctccacgctccctcctccaccccggcctcctacccacgtgtcacttctttatactcgctgccacctgaaattagatcatttatttacccctttatttgttcagtttgccttgtccgttagaatataagcttccaaagggcaggagctttgcctatattgttaggccgggcatacaatgagcactcaaaaaaatatttgatgagtgtatgaaagaacagactgggttatgtaattgtgcctacttacctatatgaccgtgtggtggggtttatggtgggtgtggtggtgatggctatagggctataagcaaatttgggacagggagtctaagaaatgttcttaaattttagtaagcaaagcatcctctacagaacctgtcttaaaacatgaaagttccttagtgctacccccagaggtatgatttggtaggtcaaggatagggcctggaaattcacattcttgttaagatgttcttcatccggggtttgttgaccaccttttcagaagatttttgctctgtagctgtactacccaatgcagtagttcgtagtcagtgtggctcctgagcccttgaagtgtagctcctctgaactgagacgtgctgtaaatgtaaattgcacaccggagtttgaagagttaatacaaagaaaaaggaatgcaaaacatctcattaataatgctttacactgattacatattgaaatggtaatcttgtagatatagtgcgttaaataaaatatactgttaggcttaatttcacgtctttatacttttaatgtggctactagaaaaatttaaataacatattcagctcacattatactcctattgaacagagctgatctataagttccatggaagatggcaagtcttcgcagctgaaataaaggctggatcccattctacgggctcatctttagcaatgatttcttgcagacgatattgaaaaatgtggcaatgaaagttaccacaagcatcaaaccagtcctgcctaaatctggaaaatagttatctgaggctgttagcatatgatcatgagagcgtttcaccatggatttctgatcacagatgtggcacattattaaaatatcacttttacagtcaccctagaggctagggttatctgaatatggagaaagaaacagcttgtggagctgttgtataaatgaaattactagaaagtaatgcactcaattgcatattggctcggggggttattcttattaaaatgtttagagaggactttctgttcatttctgcagaattgctcttcaaattaagaatttgcttgacacgctaatagaccacagtcccaagagaagtttatccttttttcttcttatccttgctaagcacttagatgctctgctgataggtagcatatattgtctatatgaagcttttgtgttaacattgactagtcctgcaagttggcacactcttacttggcctaaaagaaatcagcaccaggctttaagaaaatcagatgatctacctaaaggaacacaactctgtctctcttttgacaattgttgtaaacaaattttaatggaaatttgccttaattgtgaagaagttgctgctaaaatggacttgccattaatggactggaacccattgcataagcagaatgaaatataagccttctcaggattcacacttataaaaaaccattcagccaatcaacaagagggcaaaagaacaaacatttgatgtgtaattacttaatttagtgcatatgcatttgggtcctcaatgtcagcactatggcaaccagaacatggccacaataactgtctggaaatgtctattcttacctggacccagcaggccatgccccactgattatataatctccctctctccttgttacggtctgaatgcttgcatccctcaaaaattcatgtgttgaaatcctaacccccaaggtgatgatattaggaggtcggccttttgagaggtaattaggtcatgaagacagcatcctcatgaatgggattagtgtccttataaaataggcccaagggagctcattcactttgtccaccatgtgagaacacagcgagagggcaccatttatgcaccaggaaatgggccttttccagacaatctgtcggtgcctggatcttggacttcacagcctctagaactgtgagaaattaatttgttttttataagccaccaaatctatggttttttttatagaaaccgtaatggactaaaacactccctaattatatttaaacttatcagtgcactgggcagtgacatattaaaagaatgctggccaacgtaattgacaccataaggctggatgattcttgtaattttcagcctcagaaaaaggctggggagaggagtcaggggaaaggaggtggtgtgtgtgtgtgtgtgtgtgtgtgtgtgtgtgtgtgtggtacggtggatgcctgctgagagagaaagagctataataacattctgtggttcagctgacacatcctttctgcatcccctccaatcacctgggttaatggggacctcgctaatgtctgaacctcatctcattttaaccttttgtttcaaagcctctcttttcatgacttccccgccttcatttttcccatatggtggggttattattaagacattaaatgagagtggacaggtaggcaaaggaggtgggttgcaggggagttgagggttgcctgtgtacttttctagactgttccacttcacatcagtgaaatattcccaattgatactatcatgaaacaaagcaaatgaaatgctgagcacggagcttcgtcttgatgaaatgctgaaagaaaagaaaggaaaaataaagtagccattatttttgcccttcctcccacccccatgtttactactcttatttctcttttgtattgttgtgttggaagcacagcatcagaaaaactcccagttttgagagataactcagtgtttagttcacttaaacctgagaaaggagaagaggatgccaccgtgaggtccaggacgtaaagaggaaaaaaacagacaaaaaaatccatatgaaatgaaaatgtgaaagaggcgctttcgagcagatgagtgttgtagattacagtgttgagagctgtttgtgtccagagctgcttgctgcacctggcgggataaacactggtctaacagaggatccttgtttcaaggaggctgccttttatttggggggacaaaattgttcttgaaagctgctcagtggttcaagctacagcatggtggactagcagaatggactccagggcctccgaggagacagtgactgctgccagaaatagtcaaggatagaaaggaaggacttcactgaggcctgggagaagattatggaatgggactgacagcagtgacggggagtaaaagggggtgtctgggggaattgtgccccatggtgagagctagagggttcacaaagacttaacccgacgcatctctctcaccctggagattgggcccgttcaatctaactggatggctataatttaaaaggtttaggtattatgacaaacatggatatattaggtgatagcaatgcaaaatgcatatggcttcttgatataaaacacaagacttgaaagcagcatctttggctgggtactacagccaccctcctctgtcactaagggaggctttggtggaaagggctgagagcctctagactgtgaacaaaagtaggcacagaagaacagttggagataataagtaaaccatcttgacaggaatgaagaatttcctgaaaggaaggtccctgagttaggttgttggatgctttcagtagtgagttattgaaagtgtttggggggtgtgtgtgtgtgtgtgtatgtgcagtatgtgtgtgt

SEQ ID NO: 2 - protein, 161 aa, Homo sapiens
MDQETVGNVVLLAIVTLISVVQNGFFAHKVEHESRTQNGRSFQRTGTLAFERVYTANQNCVDAYPTFLAVLWSAGLLCSQVPAAFAGLMYLFVRQKYFVGYLGERTQSTPGYIFGKRIILFLFLMSVAGIFNYYLIFFFGSDFENYIKTISTTISPLLLIP

SEQ ID NO: 3 - DNA, 873 bp, Homo sapiens
acttccccttcctgtacagggcaggttgtgcagctggaggcagagcagtcctctctggggagcctgaagcaaacatggatcaagaaactgtaggcaatgttgtcctgttggccatcgtcaccctcatcagcgtggtccagaatggattctttgcccataaagtggagcacgaaagcaggacccagaatgggaggagcttccagaggaccggaacacttgcctttgagcgggtctacactgccaaccagaactgtgtagatgcgtaccccactttcctcgctgtgctctggtctgcggggctactttgcagccaagttcctgctgcgtttgctggactgatgtacttgtttgtgaggcaaaagtactttgtcggttacctaggagagagaacgcagagcacccctggctacatatttgggaaacgcatcatactcttcctgttcctcatgtccgttgctggcatattcaactattacctcatcttctttttcggaagtgactttgaaaactacataaagacgatctccaccaccatctcccctctacttctcattccctaactctctgctgaatatggggttggtgttctcatctaatcaatacctacaagtcatcataattcagctcttgagagcattctgctcttctttagatggctgtaaatctattggccatctgggcttcacagcttgagttaaccttgcttttccgggaacaaaatgatgtcatgtcagctccgccccttgaacatgaccgtggccccaaatttgctattcccatgcattttgtttgtttcttcacttatcctgttctctgaagatgttttgtgaccaggtttgtgttttcttaaaataaaatgcagagacatgtttt

SEQ ID NO: 4 - DNA, 24 bp, Homo sapiens
cctttgctttgttcctatttcttt

SEQ ID NO: 5 - DNA, 20 bp, Homo sapiens
tcccattgcccagagttaat

SEQ ID NO: 6 - DNA, 23 bp, Homo sapiens
tcctcatgtcttcacctagaagc

SEQ ID NO: 7 - DNA, 20 bp, Homo sapiens
ccactcatgagggagctgtt

SEQ ID NO: 8 - DNA, 21 bp, Homo sapiens
tgtcacaggcacacactctct

SEQ ID NO: 9 - DNA, 20 bp, Homo sapiens
gagtatggctgctgctcctc

SEQ ID NO: 10 - DNA, 20 bp, Homo sapiens
atggctcacactggcctaaa

SEQ ID NO: 11 - DNA, 23 bp, Homo sapiens
tgaacagaccaataatagtgcag

SEQ ID NO: 12 - DNA, 20 bp, Homo sapiens
aagccaccctttaaacagca

SEQ ID NO: 13 - DNA, 20 bp, Homo sapiens
gctgaggaagcaactccact

SEQ ID NO: 14 - DNA, 20 bp, Homo sapiens
gctctgaattccctggcata

SEQ ID NO: 15 - DNA, 21 bp, Homo sapiens
ttagccctagtcccactctcc

SEQ ID NO: 16 - DNA, 20 bp, Homo sapiens
caagaggcctgcataaggaa

SEQ ID NO: 17 - DNA, 20 bp, Homo sapiens
agattgccggtggcttaaat

SEQ ID NO: 18 - DNA, 20 bp, Homo sapiens
tgtctgttcccgtctgtctg

SEQ ID NO: 19 - DNA, 20 bp, Homo sapiens
ttcatcctctgccaaattcc

SEQ ID NO: 20 - DNA, 20 bp, Homo sapiens
ggcatgtattcactgcctga

SEQ ID NO: 21 - DNA, 23 bp, Homo sapiens
aaacccattcttcttcctcttac

SEQ ID NO: 22 - DNA, 21 bp, Homo sapiens
tatgtgttcagcccagacctc

SEQ ID NO: 23 - DNA, 19 bp, Homo sapiens
ccctgccatgtgcatttac

SEQ ID NO: 24 - DNA, 20 bp, Homo sapiens
catttcggaaggcaaagaaa

SEQ ID NO: 25 - DNA, 20 bp, Homo sapiens
ttgcaatgaggaatgaagca

SEQ ID NO: 26 - DNA, 23 bp, Homo sapiens
tccattatccatctgttcattca

SEQ ID NO: 27 - DNA, 25 bp, Homo sapiens
gaagaattaattgtaggaggcaaga

SEQ ID NO: 28 - DNA, 21 bp, Homo sapiens
ctgacatcaccacattgatcg

SEQ ID NO: 29 - DNA, 22 bp, Homo sapiens
catacacagccatgtggaatta

SEQ ID NO: 30 - DNA, 20 bp, Homo sapiens
acggtgatgacgcctacatt

SEQ ID NO: 31 - DNA, 23 bp, Homo sapiens
tcacatggaccaattacctagaa

SEQ ID NO: 32 - DNA, 25 bp, Homo sapiens
aaattacttcatcttgacgataaca

SEQ ID NO: 33 - DNA, 20 bp, Homo sapiens
ctattggggactgcagagag

SEQ ID NO: 34 - DNA, 20 bp, Homo sapiens
agccagtgtccacaaggaag

SEQ ID NO: 35 - DNA, 21 bp, Homo sapiens
gagggtgagacacatctctgg

SEQ ID NO: 36 - DNA, 20 bp, Homo sapiens
aatcgtgcctcagttccatc

SEQ ID NO: 37 - DNA, 20 bp, Homo sapiens
ccaccaggaacaacacacac

SEQ ID NO: 38 - DNA, 18 bp, Homo sapiens
ttgctctccagcctgggc

SEQ ID NO: 39 - DNA, 18 bp, Homo sapiens
ttcctctggctgcctgcg

SEQ ID NO: 40 - DNA, 20 bp, Homo sapiens
tcctgcatgagaaggaactg

SEQ ID NO: 41 - DNA, 20 bp, Homo sapiens
cgacattcactgtggctctt

SEQ ID NO: 42 - DNA, 20 bp, Homo sapiens
tttgattccgtggtccatta

SEQ ID NO: 43 - DNA, 21 bp, Homo sapiens
ttatttggtcggtgcaccttt

SEQ ID NO: 44 - DNA, 20 bp, Homo sapiens
ggtgcaccgaccaaataagt

SEQ ID NO: 45 - DNA, 22 bp, Homo sapiens
ccagcttattctctctgccttc

SEQ ID NO: 46 - DNA, 22 bp, Homo sapiens
ggtaggttgaaatgggctaaca

SEQ ID NO: 47 - DNA, 21 bp, Homo sapiens
tcatgacaaggtgttggattt

SEQ ID NO: 48 - DNA, 20 bp, Homo sapiens
cctcctctgccatgaagcta

SEQ ID NO: 49 - DNA, 20 bp, Homo sapiens
ctatttggtctgcgggttgt

SEQ ID NO: 50 - DNA, 20 bp, Homo sapiens
tactgggttatcgcctgacc

SEQ ID NO: 51 - DNA, 20 bp, Homo sapiens
ccaatggacctcttggacat

SEQ ID NO: 52 - DNA, 20 bp, Homo sapiens
tttcggcacagtcctcaata

SEQ ID NO: 53 - DNA, 19 bp, Homo sapiens
cagctgggtgtggtgacat

SEQ ID NO: 54 - DNA, 20 bp, Homo sapiens
cagagaggaacaggcagagg

SEQ ID NO: 55 - DNA, 20 bp, Homo sapiens
agtggctgggaagccttatt

SEQ ID NO: 56 - DNA, 23 bp, Homo sapiens
aggtgagagaacaaacctgtctt

SEQ ID NO: 57 - DNA, 20 bp, Homo sapiens
gccttccttctaaggccaac

SEQ ID NO: 58 - DNA, 26 bp, Homo sapiens
ctgtagactttatccctgacttactg

SEQ ID NO: 59 - DNA, 24 bp, Homo sapiens
caatgaatgatgaagattccactc

SEQ ID NO: 60 - DNA, 23 bp, Homo sapiens
tgacaccatgtcttactgtttgc

SEQ ID NO: 61 - DNA, 25 bp, Homo sapiens
gaggatacaatgagaaccaaatctc

SEQ ID NO: 62 - DNA, 20 bp, Homo sapiens
caggatcatcagccaggttt

SEQ ID NO: 63 - DNA, 20 bp, Homo sapiens
gctgcatgtcactaggcatt

SEQ ID NO: 64 - DNA, 20 bp, Homo sapiens
ccacagaatgctccaaaggt

SEQ ID NO: 65 - DNA, 22 bp, Homo sapiens
gagttcaagtgatggatgacga

SEQ ID NO: 66 - DNA, 24 bp, Homo sapiens
cagatagatgaataggtggatgga

SEQ ID NO: 67 - DNA, 20 bp, Homo sapiens
cactgttccaagtgctttgc

SEQ ID NO: 68 - DNA, 20 bp, Homo sapiens
tatgcgttgtgtgtgctgtg

SEQ ID NO: 69 - DNA, 22 bp, Homo sapiens
gggccttagattcttgtagtgg

SEQ ID NO: 70 - DNA, 20 bp, Homo sapiens
tgtccagactgcctcctaca

SEQ ID NO: 71 - DNA, 20 bp, Homo sapiens
tgcaacacctggttcacaat

SEQ ID NO: 72 - DNA, 20 bp, Homo sapiens
tttgcgagtccttgtggagt

SEQ ID NO: 73 - DNA, 20 bp, Homo sapiens
acagtccgctccctcctaat

SEQ ID NO: 74 - DNA, 18 bp, Homo sapiens
atgcttggccctcagttt

SEQ ID NO: 75 - DNA, 21 bp, Homo sapiens
ttggcaacccaagctaatatg

SEQ ID NO: 76 - DNA, 19 bp, Homo sapiens
ctccacagtgacagtgagg

SEQ ID NO: 77 - DNA, 17 bp, Homo sapiens
gagaggttcccaatccc

SEQ ID NO: 78 - DNA, 20 bp, Homo sapiens
cagctcctggccatatttct

SEQ ID NO: 79 - DNA, 20 bp, Homo sapiens
gagccatttctctgggtctg

SEQ ID NO: 80 - DNA, 20 bp, Homo sapiens
ggtccgtgtcaacccttaga

SEQ ID NO: 81 - DNA, 19 bp, Homo sapiens
caggttgatgggagggaaa

SEQ ID NO: 82 - DNA, 20 bp, Homo sapiens
cgggaaatgacagtgagacc

SEQ ID NO: 83 - DNA, 20 bp, Homo sapiens
tgcctagattctcccgtaag

SEQ ID NO: 84 - DNA, 16 bp, Homo sapiens
gtgcccagccagattc

SEQ ID NO: 85 - DNA, 16 bp, Homo sapiens
gcccccagtcaggttt

SEQ ID NO: 86 - DNA, 21 bp, Homo sapiens
tttctctctccacggaatgaa

SEQ ID NO: 87 - DNA, 21 bp, Homo sapiens
aacccattctcacagggtgta

SEQ ID NO: 88 - DNA, 20 bp, Homo sapiens
aggagtgtggcagctttgag

SEQ ID NO: 89 - DNA, 20 bp, Homo sapiens
tggattcccgtgagtaccag

SEQ ID NO: 90 - DNA, 17 bp, Homo sapiens
atgctgggatcacaggc

SEQ ID NO: 91 - DNA, 19 bp, Homo sapiens
aacctggtggacttttgct

SEQ ID NO: 92 - DNA, 20 bp, Homo sapiens
agcatttccaatggtgcttt

SEQ ID NO: 93 - DNA, 21 bp, Homo sapiens
catgttgatatgcctgaagga

SEQ ID NO: 94 - DNA, 20 bp, Homo sapiens
cactgtctgctgccactcat

SEQ ID NO: 95 - DNA, 27 bp, Homo sapiens
agagattatgtgatgtaccctctctat

SEQ ID NO: 96 - DNA, 20 bp, Homo sapiens
tgatgaagatctgggcgtta

SEQ ID NO: 97 - DNA, 20 bp, Homo sapiens
tgcctgtgctcactcactct

SEQ ID NO: 98 - DNA, 22 bp, Homo sapiens
atgacctagaaatgatactggc

SEQ ID NO: 99 - DNA, 20 bp, Homo sapiens
cagacaccacaacacacatt

SEQ ID NO: 100 - DNA, 20 bp, Homo sapiens
tggtttaaaaacctcatgcc

SEQ ID NO: 101 - DNA, 25 bp, Homo sapiens
atcccaaactctgtacttatgtagg

SEQ ID NO: 102 - DNA, 20 bp, Homo sapiens
ccttggctgttgtgactggt

SEQ ID NO: 103 - DNA, 20 bp, Homo sapiens
cactcaggtgggaggatcac

SEQ ID NO: 104 - DNA, 20 bp, Homo sapiens
cactttgccagtagccttga

SEQ ID NO: 105 - DNA, 21 bp, Homo sapiens
ttgggaaagttaacccagaga

SEQ ID NO: 106 - DNA, 20 bp, Homo sapiens
tttgggaagagccatgagac

SEQ ID NO: 107 - DNA, 20 bp, Homo sapiens
ctctgggcattggaggatta

SEQ ID NO: 108 - DNA, 20 bp, Homo sapiens
gggagacaagtcaggtgagg

SEQ ID NO: 109 - DNA, 26 bp, Homo sapiens
ctgagtatggagtcttcatcattatc

SEQ ID NO: 110 - DNA, 22 bp, Homo sapiens
tgctactagatttgaccaacca

SEQ ID NO: 111 - DNA, 26 bp, Homo sapiens
gacttgtaaaggatttagtgatttcg

SEQ ID NO: 112 - DNA, 20 bp, Homo sapiens
gtggaaggcctctctctgtg

SEQ ID NO: 113 - DNA, 20 bp, Homo sapiens
tgcttcttgagggaaagcat

SEQ ID NO: 114 - DNA, 21 bp, Homo sapiens
ccttcagaggatttccctttc

SEQ ID NO: 115 - DNA, 20 bp, Homo sapiens
ctggtttgactccagcttca

SEQ ID NO: 116 - DNA, 20 bp, Homo sapiens
cctggcacggaatagacact

SEQ ID NO: 117 - DNA, 19 bp, Homo sapiens
ggcctcctttgctctgaag

SEQ ID NO: 118 - DNA, 21 bp, Homo sapiens
catccctgtggctgattaaga

SEQ ID NO: 119 - DNA, 20 bp, Homo sapiens
aacagttccagcccgttcta

SEQ ID NO: 120 - DNA, 22 bp, Homo sapiens
tttcaaaggaatatccaagtgc

SEQ ID NO: 121 - DNA, 24 bp, Homo sapiens
tggcgtaccatataaacagttctc

SEQ ID NO: 122 - DNA, 20 bp, Homo sapiens
ttcaatgaaggtgccgaagt

SEQ ID NO: 123 - DNA, 20 bp, Homo sapiens
tgtctatcccaaagctgcaa

SEQ ID NO: 124 - DNA, 21 bp, Homo sapiens
gctcagtccaagttcatgctc

SEQ ID NO: 125 - DNA, 20 bp, Homo sapiens
tgggattgggttctggatac

SEQ ID NO: 126 - DNA, 22 bp, Homo sapiens
cctactttccatctcctccttg

SEQ ID NO: 127 - DNA, 24 bp, Homo sapiens
tggagtaagttggagaattgttga

SEQ ID NO: 128 - DNA, 24 bp, Homo sapiens
gcaagactctgttgaagaagaaga

SEQ ID NO: 129 - DNA, 21 bp, Homo sapiens
tccctctgtttgagtttctcg

SEQ ID NO: 130 - DNA, 20 bp, Homo sapiens
ccttgggcagtcagagaaac

SEQ ID NO: 131 - DNA, 20 bp, Homo sapiens
cccgtgaagtctgagaggtg

SEQ ID NO: 132 - DNA, 19 bp, Homo sapiens
aggcacagtcgctcatgtc

SEQ ID NO: 133 - DNA, 24 bp, Homo sapiens
aaactttagctaatggtggtcaaa

SEQ ID NO: 134 - DNA, 25 bp, Homo sapiens
gagcatgtgtgactttcatattcag

SEQ ID NO: 135 - DNA, 22 bp, Homo sapiens
agtggctattcattgctacagg

SEQ ID NO: 136 - DNA, 20 bp, Homo sapiens
ttgctggatgctggtttcta

SEQ ID NO: 137 - DNA, 27 bp, Homo sapiens
aaagagagagagaaagagaaagaaaga

SEQ ID NO: 138 - DNA, 22 bp, Homo sapiens
aaagtggatgcagttgaggttt

SEQ ID NO: 139 - DNA, 22 bp, Homo sapiens
gctagccattacagacaaccaa

SEQ ID NO: 140 - DNA, 21 bp, Homo sapiens
cagggctccatgtatccataa

SEQ ID NO: 141 - DNA, 20 bp, Homo sapiens
caatctttggctttgggttt

SEQ ID NO: 142 - DNA, 16 bp, Homo sapiens
ctggttgagcggcatt

SEQ ID NO: 143 - DNA, 16 bp, Homo sapiens
tgcagcctggatgaca

SEQ ID NO: 144 - DNA, 22 bp, Homo sapiens
cctatggaagcatagggaagaa

SEQ ID NO: 145 - DNA, 21 bp, Homo sapiens
cccacttctgagtctcctgat

SEQ ID NO: 146 - DNA, 20 bp, Homo sapiens
gggaaatggagctgctgtta

SEQ ID NO: 147 - DNA, 20 bp, Homo sapiens
gagtgggtgagtgcaaggat

SEQ ID NO: 148 - DNA, 17 bp, Homo sapiens
ctctcagcaggcatcca

SEQ ID NO: 149 - DNA, 19 bp, Homo sapiens
gccaacgtaattgacacca

SEQ ID NO: 150 - DNA, 21 bp, Homo sapiens
tgaaaggaaggtccctgagtt

SEQ ID NO: 151 - DNA, 21 bp, Homo sapiens
ccctgctttgcacaagttatc

SEQ ID NO: 152 - DNA, 20 bp, Homo sapiens
cacatgaggctgtatgtgga

SEQ ID NO: 153 - DNA, 20 bp, Homo sapiens
tgtgcaggaatgagaagtcg

SEQ ID NO: 154 - DNA, 18 bp, Homo sapiens
ccttaggccccataatct

SEQ ID NO: 155 - DNA, 21 bp, Homo sapiens
caaattcctcaattgcaaaat

SEQ ID NO: 156 - DNA, 20 bp, Homo sapiens
ggtcattcagggagccattc

SEQ ID NO: 157 - DNA, 25 bp, Homo sapiens
ccattatatttcaccaagaggctgc

SEQ ID NO: 158 - DNA, 20 bp, Homo sapiens
agtcaaggctgacagggaag

SEQ ID NO: 159 - DNA, 20 bp, Homo sapiens
gctctcagccctcaatgtgt

SEQ ID NO: 160 - DNA, 20 bp, Homo sapiens
atttgggttcctctcccaat

SEQ ID NO: 161 - DNA, 20 bp, Homo sapiens
acaaactcttgctgctggtg

SEQ ID NO: 162 - DNA, 20 bp, Homo sapiens
tgcctggtcatctacccatt

SEQ ID NO: 163 - DNA, 20 bp, Homo sapiens
tctactgcagcgctgatctt

SEQ ID NO: 164 - DNA, 20 bp, Homo sapiens
tccttccagaaggtttgcat

SEQ ID NO: 165 - DNA, 23 bp, Homo sapiens
tgcaaagttgttcaagagagaca

SEQ ID NO: 166 - DNA, 20 bp, Homo sapiens
cagcaggaagatggacaggt

SEQ ID NO: 167 - DNA, 21 bp, Homo sapiens
cacactgcatcacacataccc

SEQ ID NO: 168 - DNA, 18 bp, Homo sapiens
tatgccagtatgcctgct

SEQ ID NO: 169 - DNA, 19 bp, Homo sapiens
gtcacatcagtccatttgc

SEQ ID NO: 170 - DNA, 23 bp, Homo sapiens
ggtttatgtctgtgtgtgtgtgc

SEQ ID NO: 171 - DNA, 23 bp, Homo sapiens
tgagggatgtcagagaaatatgc

SEQ ID NO: 172 - DNA, 22 bp, Homo sapiens
tgatgaaattgcctagtgatgc

SEQ ID NO: 173 - DNA, 20 bp, Homo sapiens
ggatccaatcgtacgctacc

SEQ ID NO: 174 - DNA, 20 bp, Homo sapiens
acctaaacaccacggactgg

SEQ ID NO: 175 - DNA, 22 bp, Homo sapiens
caggtatcgacattcttccaaa

SEQ ID NO: 176 - DNA, 26 bp, Homo sapiens
ggtgatctagggaattatttgtcttc

SEQ ID NO: 177 - DNA, 20 bp, Homo sapiens
ttggccactaaggtccagat

SEQ ID NO: 178 - DNA, 20 bp, Homo sapiens
cctttgaggctggatctgtt

SEQ ID NO: 179 - DNA, 23 bp, Homo sapiens
tttccttatcattcattccctca

SEQ ID NO: 180 - DNA, 22 bp, Homo sapiens
agatattgtctccgttccatga

SEQ ID NO: 181 - DNA, 22 bp, Homo sapiens
cccagatataaggacctggcta

SEQ ID NO: 182 - DNA, 23 bp, Homo sapiens
tttaagccctgtggaatgtattt

SEQ ID NO: 183 - DNA, 21 bp, Homo sapiens
gacattgcaggtcaagtaggg

SEQ ID NO: 184 - DNA, 20 bp, Homo sapiens
tgcataaggctggagacaga

SEQ ID NO: 185 - DNA, 19 bp, Homo sapiens
cacagcagatgggagcaaa

SEQ ID NO: 186 - DNA, 21 bp, Homo sapiens
agccagttgtctttcatcctg

SEQ ID NO: 187 - DNA, 23 bp, Homo sapiens
tgcctgtgcttgtatattctgtg

SEQ ID NO: 188 - DNA, 20 bp, Homo sapiens
gtgcatgtgcataccagacc

SEQ ID NO: 189 - DNA, 20 bp, Homo sapiens
ggcaagatgacctctggaaa

SEQ ID NO: 190 - DNA, 22 bp, Homo sapiens
tttgtgttccaggtgagaattg

SEQ ID NO: 191 - DNA, 20 bp, Homo sapiens
gaaccatatcccaaggcact

SEQ ID NO: 192 - DNA, 22 bp, Homo sapiens
ttgttcccacattcattctaca

SEQ ID NO: 193 - DNA, 20 bp, Homo sapiens
ttaaactcgtggcaaagacg

SEQ ID NO: 194 - DNA, 18 bp, Homo sapiens
caccatgcctggctcttt

SEQ ID NO: 195 - DNA, 22 bp, Homo sapiens
aacttctccagttgtgtggttg

SEQ ID NO: 196 - DNA, 20 bp, Homo sapiens
cctaccattgacactctcag

SEQ ID NO: 197 - DNA, 16 bp, Homo sapiens
tagggccatccattct

SEQ ID NO: 198 - DNA, 25 bp, Homo sapiens
tctgtgtgtattgtgtactcctctg

SEQ ID NO: 199 - DNA, 22 bp, Homo sapiens
tcacacaatttgaaccaatcct

SEQ ID NO: 200 - DNA, 20 bp, Homo sapiens
accaagatatgaaggccaaa

SEQ ID NO: 201 - DNA, 22 bp, Homo sapiens
cctccagctagaacaatgtgaa

SEQ ID NO: 202 - DNA, 21 bp, Homo sapiens
tgatcatgtcagcagcagaag

SEQ ID NO: 203 - DNA, 20 bp, Homo sapiens
agtaacaggtgagggcatgg

SEQ ID NO: 204 - DNA, 21 bp, Homo sapiens
tgtccatagctgtagccctgt

SEQ ID NO: 205 - DNA, 20 bp, Homo sapiens
ctcaatgggcatctttaggc

SEQ ID NO: 206 - DNA, 22 bp, Homo sapiens
caaacaaacaaacaagcaaacc

SEQ ID NO: 207 - DNA, 21 bp, Homo sapiens
tggacgtttctttcagtgagg

SEQ ID NO: 208 - DNA, 23 bp, Homo sapiens
tgataacttaccagcatgtgagc

SEQ ID NO: 209 - DNA, 21 bp, Homo sapiens
tcacctcacctaaggatctgc

SEQ ID NO: 210 - DNA, 23 bp, Homo sapiens
gctagcaaatctctcaacttcca

SEQ ID NO: 211 - DNA, 20 bp, Homo sapiens
tcttctccatgctgcttcct

SEQ ID NO: 212 - DNA, 20 bp, Homo sapiens
catgcaattgcccaatagag

SEQ ID NO: 213 - DNA, 22 bp, Homo sapiens
ttgggcttgtctacctagttca

SEQ ID NO: 214 - DNA, 20 bp, Homo sapiens
gctgcacgtatttgttggtg

SEQ ID NO: 215 - DNA, 20 bp, Homo sapiens
aaacagcagaaatgggaacc

SEQ ID NO: 216 - DNA, 20 bp, Homo sapiens
ccgtgggctatcaatttctg

SEQ ID NO: 217 - DNA, 21 bp, Homo sapiens
aagatgcaatctggtttccaa

SEQ ID NO: 218 - DNA, 20 bp, Homo sapiens
cccaagactgaggaggtcaa

SEQ ID NO: 219 - DNA, 20 bp, Homo sapiens
gctgacggagaggaaagaga

SEQ ID NO: 220 - DNA, 20 bp, Homo sapiens
tcacaaagcaagcaatcaca

SEQ ID NO: 221 - DNA, 20 bp, Homo sapiens
tgatggatgcaccatgttta

SEQ ID NO: 222 - DNA, 20 bp, Homo sapiens
tgagaagcctgggcattaag

SEQ ID NO: 223 - DNA, 20 bp, Homo sapiens
acaagctcatccagggaaag

SEQ ID NO: 224 - DNA, 19 bp, Homo sapiens
agagctgatctggccgaag

SEQ ID NO: 225 - DNA, 21 bp, Homo sapiens
ggtggacacagaatccacact

SEQ ID NO: 226 - DNA, 18 bp, Homo sapiens
ggcctgaaaggtatcctc

SEQ ID NO: 227 - DNA, 18 bp, Homo sapiens
tcccaccataagcacaag

SEQ ID NO: 228 - DNA, 22 bp, Homo sapiens
tcaacctaggattggcattaca

SEQ ID NO: 229 - DNA, 21 bp, Homo sapiens
tctaggatttgtgcctttcca

SEQ ID NO: 230 - DNA, 20 bp, Homo sapiens
attcgtgcagctgtttctgc

SEQ ID NO: 231 - DNA, 22 bp, Homo sapiens
gcatgacattgtaaatggagga

SEQ ID NO: 232 - DNA, 20 bp, Homo sapiens
ggtgggaatgtgtgactgaa

SEQ ID NO: 233 - DNA, 22 bp, Homo sapiens
ccaggtacaacattctcctgat

SEQ ID NO: 234 - DNA, 16 bp, Homo sapiens
tgcaggtgggagtcaa

SEQ ID NO: 235 - DNA, 24 bp, Homo sapiens
aaataacaagaagtgaccttccta

SEQ ID NO: 236 - DNA, 21 bp, Homo sapiens
aaaggatgcattcggttagag

SEQ ID NO: 237 - DNA, 20 bp, Homo sapiens
actgtcctgtgcctgtgctt

SEQ ID NO: 238 - DNA, 20 bp, Homo sapiens
gtccacctaatggctcattc

SEQ ID NO: 239 - DNA, 21 bp, Homo sapiens
caagaagcactcatgtttgtg

SEQ ID NO: 240 - DNA, 19 bp, Homo sapiens
agcctgtgattggctgaga

SEQ ID NO: 241 - DNA, 20 bp, Homo sapiens
ggcttacagctgcctccttt

SEQ ID NO: 242 - DNA, 21 bp, Homo sapiens
cccacagagcactttgttaga

SEQ ID NO: 243 - DNA, 21 bp, Homo sapiens
gcctcccttaagctgttatgc

SEQ ID NO: 244 - DNA, 23 bp, Homo sapiens
cactctttactgccaatcactcc

SEQ ID NO: 245 - DNA, 19 bp, Homo sapiens
gccgtgtgggtgtatgaat

SEQ ID NO: 246 - DNA, 22 bp, Homo sapiens
ttgtaccaggaaccaaagacaa

SEQ ID NO: 247 - DNA, 20 bp, Homo sapiens
cacagacagaggcacattga

SEQ ID NO: 248 - DNA, 20 bp, Homo sapiens
gctctggtcactcctgctgt

SEQ ID NO: 249 - DNA, 19 bp, Homo sapiens
catgcctggctgattgttt

SEQ ID NO: 250 - DNA, 16 bp, Homo sapiens
ccaacatcgggaactg

SEQ ID NO: 251 - DNA, 21 bp, Homo sapiens
tgcattctttaagtccatgtc

SEQ ID NO: 252 - DNA, 21 bp, Homo sapiens
cagcaactgacaactcatcca

SEQ ID NO: 253 - DNA, 20 bp, Homo sapiens
cctcaatcctcagctccaac

SEQ ID NO: 254 - DNA, 21 bp, Homo sapiens
tgattggttctgttgttgctg

SEQ ID NO: 255 - DNA, 19 bp, Homo sapiens
agcccaaggctcttgtgag

SEQ ID NO: 256 - DNA, 21 bp, Homo sapiens
tccttcacagcttcaaactca

SEQ ID NO: 257 - DNA, 22 bp, Homo sapiens
agtgagaagcttccatactggt

SEQ ID NO: 258 - DNA, 20 bp, Homo sapiens
gccaaccgttagacaaatga

SEQ ID NO: 259 - DNA, 21 bp, Homo sapiens
ctacatgtgcaccacaacacc

SEQ ID NO: 260 - DNA, 19 bp, Homo sapiens
agtttattgccgccgagag

SEQ ID NO: 261 - DNA, 19 bp, Homo sapiens
acccaccacattcacaagc

SEQ ID NO: 262 - DNA, 20 bp, Homo sapiens
cgattgccatgtctctttga

SEQ ID NO: 263 - DNA, 20 bp, Homo sapiens
gagatctggcctggatttgt

SEQ ID NO: 264 - DNA, 23 bp, Homo sapiens
tcattgtcagcacagaatgaact

SEQ ID NO: 265 - DNA, 20 bp, Homo sapiens
ggagggagggaagaaagaga

SEQ ID NO: 266 - DNA, 22 bp, Homo sapiens
gggaagaggagattgacttgtt

SEQ ID NO: 267 - DNA, 20 bp, Homo sapiens
ggaacaccatcattccaacc

SEQ ID NO: 268 - DNA, 20 bp, Homo sapiens
tacaagctccaccgtccttc

SEQ ID NO: 269 - DNA, 20 bp, Homo sapiens
tgagttgctgcctcttcaaa

SEQ ID NO: 270 - DNA, 20 bp, Homo sapiens
tgctaatgggccaaggaata

SEQ ID NO: 271 - DNA, 23 bp, Homo sapiens
gctaaatgtcctcatgaatagcc

SEQ ID NO: 272 - DNA, 20 bp, Homo sapiens
tgtcctgcagacagatggtc

SEQ ID NO: 273 - DNA, 20 bp, Homo sapiens
cctccggagtagctggatta

SEQ ID NO: 274 - DNA, 20 bp, Homo sapiens
gagactggccctcattcttg

SEQ ID NO: 275 - DNA, 25 bp, Homo sapiens
aagaagccagagacaaagaaataca

SEQ ID NO: 276 - DNA, 24 bp, Homo sapiens
catctatctttggattcagtggtg

SEQ ID NO: 277 - DNA, 20 bp, Homo sapiens
tgctcccaacatcttaccag

SEQ ID NO: 278 - DNA, 23 bp, Homo sapiens
tgtcctctggtcatttctatggt

SEQ ID NO: 279 - DNA, 23 bp, Homo sapiens
catgaatgagaagtgatgaatgg

SEQ ID NO: 280 - DNA, 22 bp, Homo sapiens
cagacactgtaaactggcttcg

SEQ ID NO: 281 - DNA, 20 bp, Homo sapiens
gccacattgctatcagcgta

SEQ ID NO: 282 - DNA, 20 bp, Homo sapiens
atgtgctgtggtccagattt

SEQ ID NO: 283 - DNA, 25 bp, Homo sapiens
cctactactgcaattactccctacc

SEQ ID NO: 284 - DNA, 21 bp, Homo sapiens
tgtcataggcttgcggtattt

SEQ ID NO: 285 - DNA, 20 bp, Homo sapiens
ttggtagggtcctttccttt

SEQ ID NO: 286 - DNA, 20 bp, Homo sapiens
gcctgctcactgttgtttga

SEQ ID NO: 287 - DNA, 21 bp, Homo sapiens
cggttatcagagactggtggt

SEQ ID NO: 288 - DNA, 21 bp, Homo sapiens
ggcttatttcatgtacggcta

SEQ ID NO: 289 - DNA, 26 bp, Homo sapiens
ggttaaactctacttagtcctgatgc

SEQ ID NO: 290 - DNA, 20 bp, Homo sapiens
gaactctgcaggcacctctt

SEQ ID NO: 291 - DNA, 20 bp, Homo sapiens
cctgaagcgcttgtactgaa

SEQ ID NO: 292 - DNA, 20 bp, Homo sapiens
ttggcttctcgctctttctt

SEQ ID NO: 293 - DNA, 20 bp, Homo sapiens
agccatcagtcacatgcaaa

SEQ ID NO: 294 - DNA, 20 bp, Homo sapiens
agatctccagggcagaggac

SEQ ID NO: 295 - DNA, 20 bp, Homo sapiens
ccttcctccctccttctctc

SEQ ID NO: 296 - DNA, 22 bp, Homo sapiens
cagtcaaatgtctcaaccttcc

SEQ ID NO: 297 - DNA, 20 bp, Homo sapiens
ctagcaacatggccaagaaa

SEQ ID NO: 298 - DNA, 21 bp, Homo sapiens
cgtcattgatcccaatcatct

SEQ ID NO: 299 - DNA, 20 bp, Homo sapiens
ggctgatagcctcccttgta

SEQ ID NO: 300 - DNA, 20 bp, Homo sapiens
acctttcaagcttccggttt

SEQ ID NO: 301 - DNA, 20 bp, Homo sapiens
ttccatccgtccatctatcc

SEQ ID NO: 302 - DNA, 23 bp, Homo sapiens
ttaaagtcacttgtctgtggtca

SEQ ID NO: 303 - DNA, 27 bp, Homo sapiens
tttgtaggaatcaagtcaaataatgta

SEQ ID NO: 304 - DNA, 20 bp, Homo sapiens
ctttcggaagcttgagccta

SEQ ID NO: 305 - DNA, 20 bp, Homo sapiens
cccaagaccactgccatatt

SEQ ID NO: 306 - DNA, 22 bp, Homo sapiens
tgacaggtttgggtatattgga

SEQ ID NO: 307 - DNA, 20 bp, Homo sapiens
tgcttaatgtagtggcagca

SEQ ID NO: 308 - DNA, 20 bp, Homo sapiens
tcctgcctttgtgaattcct

SEQ ID NO: 309 - DNA, 20 bp, Homo sapiens
gttgaatgaggtgggcatta

SEQ ID NO: 310 - DNA, 22 bp, Homo sapiens
ttgggaataaatcaggtgttga

SEQ ID NO: 311 - DNA, 20 bp, Homo sapiens
gcagcagctcagcatttctc

SEQ ID NO: 312 - DNA, 21 bp, Homo sapiens
ccatttaatcctccagccatt

SEQ ID NO: 313 - DNA, 20 bp, Homo sapiens
gctccaccttgttaccctga

SEQ ID NO: 314 - DNA, 20 bp, Homo sapiens
acaaccctggaatctggact

SEQ ID NO: 315 - DNA, 22 bp, Homo sapiens
gaaggaaaggaaaggaaagaaa

SEQ ID NO: 316 - DNA, 23 bp, Homo sapiens
tgacaagactgaaacttcatcag

SEQ ID NO: 317 - DNA, 20 bp, Homo sapiens
gatgcttgctttgggaggta

SEQ ID NO: 318 - DNA, 20 bp, Homo sapiens
caggttagagcccatccaag

SEQ ID NO: 319 - DNA, 20 bp, Homo sapiens
aggctcagcttcatccacat

SEQ ID NO: 320 - DNA, 20 bp, Homo sapiens
aagcaaatatgcaaaattgc

SEQ ID NO: 321 - DNA, 23 bp, Homo sapiens
tccttctgtttcttgacttaaca

SEQ ID NO: 322 - DNA, 20 bp, Homo sapiens
gggaacaggtcacaggtcat

SEQ ID NO: 323 - DNA, 20 bp, Homo sapiens
ggaagactgggtggtcacag

SEQ ID NO: 324 - DNA, 20 bp, Homo sapiens
ttccttctgcttgtgagctg

SEQ ID NO: 325 - DNA, 20 bp, Homo sapiens
taccctcaccttcctcatgc

SEQ ID NO: 326 - DNA, 20 bp, Homo sapiens
gaagacattggcaggtctgg

SEQ ID NO: 327 - DNA, 20 bp, Homo sapiens
gagccctcatgttgggataa

SEQ ID NO: 328 - DNA, 22 bp, Homo sapiens
ttgttgattctcccattctgtg

SEQ ID NO: 329 - DNA, 25 bp, Homo sapiens
tcacctacctcatctcatactcaaa

SEQ ID NO: 330 - DNA, 20 bp, Homo sapiens
tcttccggacaagtttccaa

SEQ ID NO: 331 - DNA, 20 bp, Homo sapiens
tgggtcattctggacattca

SEQ ID NO: 332 - DNA, 20 bp, Homo sapiens
gcaaatgaggctggtaaggt

SEQ ID NO: 333 - DNA, 20 bp, Homo sapiens
tgcactgtggtagagggaaa

SEQ ID NO: 334 - DNA, 27 bp, Homo sapiens
caacatactcctatgcctagaaagaaa

SEQ ID NO: 335 - DNA, 20 bp, Homo sapiens
ctcaccaggcagaaacaggt

SEQ ID NO: 336 - DNA, 19 bp, Homo sapiens
cccaatggcatgcttcact

SEQ ID NO: 337 - DNA, 19 bp, Homo sapiens
ggttctcccagcattggtt

SEQ ID NO: 338 - DNA, 20 bp, Homo sapiens
aaggcctctgggtaggtagg

SEQ ID NO: 339 - DNA, 20 bp, Homo sapiens
aagcaatccttatgggctct

SEQ ID NO: 340 - DNA, 20 bp, Homo sapiens
ccaggtaatcagaagcctca

SEQ ID NO: 341 - DNA, 20 bp, Homo sapiens
ttccgttaaatccagccatc

SEQ ID NO: 342 - DNA, 20 bp, Homo sapiens
cagggactgcagtgtctcaa

SEQ ID NO: 343 - DNA, 20 bp, Homo sapiens
atgccacatttgcctctctc

SEQ ID NO: 344 - DNA, 25 bp, Homo sapiens
ccaccttccacttaatacaaacttc

SEQ ID NO: 345 - DNA, 21 bp, Homo sapiens
gaagcaatccattccaagaaa

SEQ ID NO: 346 - DNA, 20 bp, Homo sapiens
gtcctgagggtgtccaggta

SEQ ID NO: 347 - DNA, 22 bp, Homo sapiens
gctggagaactcctattctgct

SEQ ID NO: 348 - DNA, 20 bp, Homo sapiens
tggagctattgcggttctct

SEQ ID NO: 349 - DNA, 23 bp, Homo sapiens
tcaaatctctctttcctcctcct

SEQ ID NO: 350 - DNA, 20 bp, Homo sapiens
cagttccagctacgggagaa

SEQ ID NO: 351 - DNA, 20 bp, Homo sapiens
ccgcatttaggcaagtctca

SEQ ID NO: 352 - DNA, 20 bp, Homo sapiens
aagcacacacagatgctagg

SEQ ID NO: 353 - DNA, 20 bp, Homo sapiens
cctcagcctccataatctca

SEQ ID NO: 354 - DNA, 20 bp, Homo sapiens
gtacagagcccaccttctgg

SEQ ID NO: 355 - DNA, 20 bp, Homo sapiens
tcactatgctgcaaggcaag

SEQ ID NO: 356 - DNA, 23 bp, Homo sapiens
ggtgcttgctgtaaatataattg

SEQ ID NO: 357 - DNA, 20 bp, Homo sapiens
cactacagcagattgcacca

SEQ ID NO: 358 - DNA, 20 bp, Homo sapiens
gatttgaaaatgagcagtcc

SEQ ID NO: 359 - DNA, 20 bp, Homo sapiens
gtcgggcactacgtttatct

SEQ ID NO: 360 - DNA, 20 bp, Homo sapiens
tgggtgaagatgctacctga

SEQ ID NO: 361 - DNA, 20 bp, Homo sapiens
cccttcttcctttccctctc

SEQ ID NO: 362 - DNA, 21 bp, Homo sapiens
tgccaggtctgagttgtaagc

SEQ ID NO: 363 - DNA, 20 bp, Homo sapiens
cagcatgagaccctgtcaaa

SEQ ID NO: 364 - DNA, 27 bp, Homo sapiens
gaaagaaagaaagaaagaagaaagaaa

SEQ ID NO: 365 - DNA, 20 bp, Homo sapiens
aatcaccaaacctggaagca

SEQ ID NO: 366 - DNA, 27 bp, Homo sapiens
gaaagaaagaaagaaagaagaaagaaa

SEQ ID NO: 367 - DNA, 20 bp, Homo sapiens
aatcaccaaacctggaagca

SEQ ID NO: 368 - DNA, 25 bp, Homo sapiens
tctgagttaaacacttgagttgctg

SEQ ID NO: 369 - DNA, 21 bp, Homo sapiens
ccagtaaatggcagtgtggtt

SEQ ID NO: 370 - DNA, 27 bp, Homo sapiens
tgtcatggatatttctacataaaccaa

SEQ ID NO: 371 - DNA, 23 bp, Homo sapiens
tgaagatggttattgcttccttc

SEQ ID NO: 372 - DNA, 20 bp, Homo sapiens
cgctttgtttggtttggttt

SEQ ID NO: 373 - DNA, 20 bp, Homo sapiens
atgcagttgtcccacatgct

SEQ ID NO: 374 - DNA, 20 bp, Homo sapiens
tcctgcactccaaaggaaac

SEQ ID NO: 375 - DNA, 25 bp, Homo sapiens
aactctggtttaattcagctttgtc

SEQ ID NO: 376 - DNA, 21 bp, Homo sapiens
ttcttgagggcataaagctga

SEQ ID NO: 377 - DNA, 20 bp, Homo sapiens
cacactcaccaggcactctg

SEQ ID NO: 378 - DNA, 23 bp, Homo sapiens
caggtttgatgaaggaaatatgc

SEQ ID NO: 379 - DNA, 22 bp, Homo sapiens
gggatcctctgcatttctctaa

SEQ ID NO: 380 - DNA, 20 bp, Homo sapiens
tttgccaaatcaaccttcag

SEQ ID NO: 381 - DNA, 20 bp, Homo sapiens
cctgcttcacacctctgacc

SEQ ID NO: 382 - DNA, 20 bp, Homo sapiens
actcacacacaaccaccaca

SEQ ID NO: 383 - DNA, 20 bp, Homo sapiens
gctactggtgggtcgtaagc

SEQ ID NO: 384 - DNA, 18 bp, Homo sapiens
ttcagagaccatcacggc

SEQ ID NO: 385 - DNA, 25 bp, Homo sapiens
ctggaaaaatcagttgaatcctagc

SEQ ID NO: 386 - DNA, 20 bp, Homo sapiens
aggaaagccgagaaagcata

SEQ ID NO: 387 - DNA, 20 bp, Homo sapiens
catgtatccacatgcccaga

SEQ ID NO: 388 - DNA, 20 bp, Homo sapiens
ccttcagcgcagctacatct

SEQ ID NO: 389 - DNA, 20 bp, Homo sapiens
agaactgcgaggtccaagtg

SEQ ID NO: 390 - DNA, 22 bp, Homo sapiens
gggagaaagagaggtaggaagg

SEQ ID NO: 391 - DNA, 20 bp, Homo sapiens
ttcccaagttagcagcatcc

SEQ ID NO: 392 - DNA, 27 bp, Homo sapiens
ttctagaggagtctatttctttactgg

SEQ ID NO: 393 - DNA, 21 bp, Homo sapiens
ggagctgtcacttgagctttg

SEQ ID NO: 394 - DNA, 20 bp, Homo sapiens
ccgtgacctacagggaacat

SEQ ID NO: 395 - DNA, 20 bp, Homo sapiens
ggcatcgggtgtttctattc

SEQ ID NO: 396 - DNA, 20 bp, Homo sapiens
agacctgcctgtgttctggt

SEQ ID NO: 397 - DNA, 23 bp, Homo sapiens
ggagtgaaataagtggaactgga

SEQ ID NO: 398 - DNA, 26 bp, Homo sapiens
cattaaatgagtcataaaggtcatgg

SEQ ID NO: 399 - DNA, 20 bp, Homo sapiens
aacattgttgctttgctgga

SEQ ID NO: 400 - DNA, 20 bp, Homo sapiens
ggccttagctcagtttctgg

SEQ ID NO: 401 - DNA, 20 bp, Homo sapiens
tgcaaagacatttgcggata

SEQ ID NO: 402 - DNA, 19 bp, Homo sapiens
cctgcatttgtgtacgtgt

SEQ ID NO: 403 - DNA, 23 bp, Homo sapiens
cagagccgtggtagtatattttt

SEQ ID NO: 404 - DNA, 20 bp, Homo sapiens
ggaaccagtcatttgggtgt

SEQ ID NO: 405 - DNA, 20 bp, Homo sapiens
ttattgctccctcgtccaag

SEQ ID NO: 406 - DNA, 26 bp, Homo sapiens
tgccttaaggtctattatttcctttc

SEQ ID NO: 407 - DNA, 20 bp, Homo sapiens
accaatgcaggaagactcaa

SEQ ID NO: 408 - DNA, 21 bp, Homo sapiens
ctgatgaaaggacacacatgc

SEQ ID NO: 409 - DNA, 23 bp, Homo sapiens
tgcattaactatgcagcttgaaa

SEQ ID NO: 410 - DNA, 18 bp, Homo sapiens
gtcgtgcaatcccgagag

SEQ ID NO: 411 - DNA, 20 bp, Homo sapiens
ggattcctgctggctcttct

SEQ ID NO: 412 - DNA, 20 bp, Homo sapiens
ctggtgtggtcaggaaatga

SEQ ID NO: 413 - DNA, 24 bp, Homo sapiens
gtgctaaacacatgtgagtgagag

SEQ ID NO: 414 - DNA, 22 bp, Homo sapiens
tttgaccatgctttctctttga

SEQ ID NO: 415 - DNA, 20 bp, Homo sapiens
gcttgatgactccctgctgt

SEQ ID NO: 416 - DNA, 20 bp, Homo sapiens
aagccattgaaaggcaggta

SEQ ID NO: 417 - DNA, 20 bp, Homo sapiens
gggactttccggcttctatt

SEQ ID NO: 418 - DNA, 20 bp, Homo sapiens
ggtttgggaaccattctcct

SEQ ID NO: 419 - DNA, 22 bp, Homo sapiens
gcagagaagggatttactccag

SEQ ID NO: 420 - DNA, 20 bp, Homo sapiens
acttgacatggagcaagctg

SEQ ID NO: 421 - DNA, 21 bp, Homo sapiens
agctcatcatgctgtaaggag

SEQ ID NO: 422 - DNA, 20 bp, Homo sapiens
cacaggctctcacattctcg

SEQ ID NO: 423 - DNA, 20 bp, Homo sapiens
tgacactcatccctctgctg

SEQ ID NO: 424 - DNA, 27 bp, Homo sapiens
tgagtttcataagtttactacctgctg

SEQ ID NO: 425 - DNA, 20 bp, Homo sapiens
ggcagggagaaaggacaaat

SEQ ID NO: 426 - DNA, 22 bp, Homo sapiens
tcccttatgtgggattagttga

SEQ ID NO: 427 - DNA, 23 bp, Homo sapiens
cagacatggaactgagatttttt

SEQ ID NO: 428 - DNA, 22 bp, Homo sapiens
tgttccatctctctacccatgt

SEQ ID NO: 429 - DNA, 24 bp, Homo sapiens
tcaatgttcttattgagtgggaaa

SEQ ID NO: 430 - DNA, 20 bp, Homo sapiens
atatccacccacccacacat

SEQ ID NO: 431 - DNA, 20 bp, Homo sapiens
tagctctgagggcagagacc

SEQ ID NO: 432 - DNA, 19 bp, Homo sapiens
ccgtccttcctccactgat

SEQ ID NO: 433 - DNA, 20 bp, Homo sapiens
agagcactgagggagcaaat

SEQ ID NO: 434 - DNA, 20 bp, Homo sapiens
agctacagcacgaggcagtt

SEQ ID NO: 435 - DNA, 21 bp, Homo sapiens
tttgaattgagttgctgttcg

SEQ ID NO: 436 - DNA, 21 bp, Homo sapiens
tgtacaccaccaaccattctg

SEQ ID NO: 437 - DNA, 20 bp, Homo sapiens
gggaagaaaggcaaatagca

SEQ ID NO: 438 - DNA, 20 bp, Homo sapiens
ggattggcaattagcaggtc

SEQ ID NO: 439 - DNA, 22 bp, Homo sapiens
gcctggtcaaagataacagacg

SEQ ID NO: 440 - DNA, 20 bp, Homo sapiens
cctgattaagctggcctttg

SEQ ID NO: 441 - DNA, 20 bp, Homo sapiens
atccttctgggaccctcatc

SEQ ID NO: 442 - DNA, 20 bp, Homo sapiens
gctttgcttccttcttggtg

SEQ ID NO: 443 - DNA, 20 bp, Homo sapiens
caacattacggccagtctca

SEQ ID NO: 444 - DNA, 20 bp, Homo sapiens
ggtgcatctgataagccaaa

SEQ ID NO: 445 - DNA, 20 bp, Homo sapiens
gctgtcttggacacagtgga

SEQ ID NO: 446 - DNA, 20 bp, Homo sapiens
caccatcatcatctggttgg

SEQ ID NO: 447 - DNA, 20 bp, Homo sapiens
gagctcattgaaaggcagga

SEQ ID NO: 448 - DNA, 25 bp, Homo sapiens
ccatccatctatccatttatctctg

SEQ ID NO: 449 - DNA, 20 bp, Homo sapiens
ggatttatccttgccctgct

SEQ ID NO: 450 - DNA, 23 bp, Homo sapiens
ctatcatccatccatcctatttg

SEQ ID NO: 451 - DNA, 20 bp, Homo sapiens
ttagggcagctacctggaaa

SEQ ID NO: 452 - DNA, 20 bp, Homo sapiens
  misc_feature 8: n = A,T,C or G
aggactanagatgaatgctc

SEQ ID NO: 453 - DNA, 20 bp, Homo sapiens
gacatgactccatgtttggt

SEQ ID NO: 454 - DNA, 20 bp, Homo sapiens
cctcaccttgcaatttcctg

SEQ ID NO: 455 - DNA, 20 bp, Homo sapiens
ctgacttgcctgttggcata

SEQ ID NO: 456 - DNA, 21 bp, Homo sapiens
tttgggatcttgaagaccttt

SEQ ID NO: 457 - DNA, 19 bp, Homo sapiens
ttgtggcatgtccttggtt

SEQ ID NO: 458 - DNA, 23 bp, Homo sapiens
tgtacactgcaaacattgctaaa

SEQ ID NO: 459 - DNA, 24 bp, Homo sapiens
ttgtcctttcattatgacgtgtct

SEQ ID NO: 460 - DNA, 23 bp, Homo sapiens
aagcctgaaaggatacacacaaa

SEQ ID NO: 461 - DNA, 20 bp, Homo sapiens
caggatcccagactttccag

SEQ ID NO: 462 - DNA, 20 bp, Homo sapiens
ggtgaatcccaccctcatac

SEQ ID NO: 463 - DNA, 24 bp, Homo sapiens
ttggtatgtttcctattgttgcat

SEQ ID NO: 464 - DNA, 21 bp, Homo sapiens
gaaccagtgagtttttattac

SEQ ID NO: 465 - DNA, 21 bp, Homo sapiens
agacacagcatataatacatg

SEQ ID NO: 466 - DNA, 20 bp, Homo sapiens
tgaagctttgtggcttgttg

SEQ ID NO: 467 - DNA, 20 bp, Homo sapiens
gactgagtccacagcccatt

SEQ ID NO: 468 - DNA, 25 bp, Homo sapiens
cctggcctgttagtttttattgtta

SEQ ID NO: 469 - DNA, 22 bp, Homo sapiens
cccagtcttgggtatgttttta

SEQ ID NO: 470 - DNA, 20 bp, Homo sapiens
ccaccatgcaagaacagatg

SEQ ID NO: 471 - DNA, 20 bp, Homo sapiens
gctttgcacttggctgtctt

SEQ ID NO: 472 - DNA, 24 bp, Homo sapiens
ttgcatgaagtaaagtatccctgt

SEQ ID NO: 473 - DNA, 21 bp, Homo sapiens
cacaaaccacaagatgattgg

SEQ ID NO: 474 - DNA, 21 bp, Homo sapiens
gggcatcatgtctacaactca

SEQ ID NO: 475 - DNA, 20 bp, Homo sapiens
accaagggcacttgctgata

SEQ ID NO: 476 - DNA, 20 bp, Homo sapiens
aggatgaagagggaggaagg

SEQ ID NO: 477 - DNA, 26 bp, Homo sapiens
ccagactgatcttccttaattagttg

SEQ ID NO: 478 - DNA, 20 bp, Homo sapiens
cctcctctttctgctgctgt

SEQ ID NO: 479 - DNA, 21 bp, Homo sapiens
agccaaagaacccaaagaaac

SEQ ID NO: 480 - DNA, 20 bp, Homo sapiens
gccctactttgcctcagaaa

SEQ ID NO: 481 - DNA, 20 bp, Homo sapiens
gcaactcatgccagcctcta

SEQ ID NO: 482 - DNA, 22 bp, Homo sapiens
aactgtgttaatgatgggcaaa

SEQ ID NO: 483 - DNA, 20 bp, Homo sapiens
aacgagcgcatgaaacctat

SEQ ID NO: 484 - DNA, 20 bp, Homo sapiens
cctggtcaattgaacccaaa

SEQ ID NO: 485 - DNA, 23 bp, Homo sapiens
tgaaggaagataaagcagggtaa

SEQ ID NO: 486 - DNA, 20 bp, Homo sapiens
ctctctctggccctctcttg

SEQ ID NO: 487 - DNA, 23 bp, Homo sapiens
ggtaacttgccattcttctacca

SEQ ID NO: 488 - DNA, 20 bp, Homo sapiens
actccacctgaagggagaaa

SEQ ID NO: 489 - DNA, 21 bp, Homo sapiens
tggaagccactaattggagaa

SEQ ID NO: 490 - DNA, 23 bp, Homo sapiens
aatggatggatacctccttatca

SEQ ID NO: 491 - DNA, 20 bp, Homo sapiens
ctcattgtggctttctgtgc

SEQ ID NO: 492 - DNA, 20 bp, Homo sapiens
gtacccacacctcaccaagc

SEQ ID NO: 493 - DNA, 20 bp, Homo sapiens
cgtagctcacattcccaaca

SEQ ID NO: 494 - DNA, 20 bp, Homo sapiens
ggcgagtgaaagagaggaca

SEQ ID NO: 495 - DNA, 20 bp, Homo sapiens
gggtggtaattcccagatga

SEQ ID NO: 496 - DNA, 20 bp, Homo sapiens
tctgcaacagccagaatcaa

SEQ ID NO: 497 - DNA, 22 bp, Homo sapiens
tgtctgttggcaactttctgtc

SEQ ID NO: 498 - DNA, 20 bp, Homo sapiens
aggtgaacccagtccagcta

SEQ ID NO: 499 - DNA, 20 bp, Homo sapiens
tcttaggcaaaggagccagt

SEQ ID NO: 500 - DNA, 19 bp, Homo sapiens
acatgagcactggtgactg

SEQ ID NO: 501 - DNA, 20 bp, Homo sapiens
ggcctcaaatgttttaagca

SEQ ID NO: 502 - DNA, 20 bp, Homo sapiens
ttctgggtgttcgctattcc

SEQ ID NO: 503 - DNA, 20 bp, Homo sapiens
tttcctgtccagtcctgacc

SEQ ID NO: 504 - DNA, 22 bp, Homo sapiens
gttttgcaggtctaggtcacac

SEQ ID NO: 505 - DNA, 17 bp, Homo sapiens
aggatagcttgagcccg

SEQ ID NO: 506 - DNA, 396 bp, Homo sapiens
gattatatcccacctaccactgcagctccaggatccagcttcacaaacatttgttgaatgaatgaataagaaaagaggacacccccaaagaggctgcaagggaaaaagctacaaagacagaagcaccaggaaaaagtagggtcatgtaagtcaaagcaggaaaaaagttccatggtggggtggtcagcagtgtctaatrccacgaaggcacaaagtaggataaaggttaaaaatcagcctttggttttggcaaatatgaagcttatcggtagccttagcgagaacaattccatcagggagcagaagctaactgcagtgggttgagtcatcaagcaggcataaggaagtagggataccccattataagctactctttcaagaagctcaaatctgaag

SEQ ID NO: 507 - DNA, 396 bp, Homo sapiens
acaaaaattaccatcatatgctgtcatgcatgtctgccagtctatttatcatattatttaagaaacaaacatttattgaagatttatcatgtgctcagcactgccaaagaggaaataaagagcataatatctattcttagaaaataacattaacacaaatagaaaacaagaaaccataatgttaaaaatattacatagyaacacagaaagacaatgtataattatacatacgcactaaagcaaagataacataatttataaattatgaggtacagaatagttagattctgaaaattaaaataatcaggaaaaacttcatgaagatgagatctgggctggatcccaaaggataggcaggtggatcatgtagaacaggggaaaggagttcctgatcgg

SEQ ID NO: 508 - DNA, 396 bp, Homo sapiens
aactaaagaaagccacaaaagttcacctcaatgccaagacatttcttgatttttgaaaacccagttgtcgaaccacccatctatagaaacttgaaagactaaaaactatcttactctaaacattttctaggaagttgattctacaacacattttggttttccaatttggcttctaataattatttcaaagtttctgtgrcctaaattttgttttacattgatcctttgaatggactactgtttccacattttagaacatttaaaaagatatctacaacccgagtctaatcataaaaaaaatcagacagatccaaaatgtggaacattccactaaaaaaggagtggggagaggtctttattcttccaaaaatatcaatgccataaaagacaaagacg

SEQ ID NO: 509 - DNA, 396 bp, Homo sapiens
acccttcaaccccagcccagctgctaactgactacagccacatgaacagaaccaggtgagaccagaggaaacttccagtcacctaccagatcatgacaaataataaacgatgttttttaaaccacaaagatttggagcagcatttgttacacaaaattagacaactattacagttcgactaaaaacatgttcatttacratactaaattagaagtgtaagaatgggagaaaaacttcatactttaaaagtcattttttcctccaaaaacttccaactttgaaaaactgatttttataatgcataaaaattaaaataaccttagaatttatatgagtagcatagccagctggctttattatctgttgtactcaacacttcaataatcactgatgttt

SEQ ID NO: 510 - DNA, 396 bp, Homo sapiens
atgaccttacctcgttttgttttccttgtctgagagaaacacattagcagtctcccatcttgtttttccttttcctgtcacccaggacagagggcagtggtgtgatcacagctctgcagcacgacttccccaggttcaggtgatcctcccacctcagcctcccaaggagctgggaccacaggcacatgccaccacgtcsagcttaattttgtatttttttggtagagatcaggttttgccttattgccccaagctgatcttgaattcctgggctgaagcaatctgcctgccctggcctctccaagtgttaggattacaggtataagccaccgtgcagccttatattttgttttaaattttcctctgtatttttctctctggcaaattgtttaggga

SEQ ID NO: 511 - DNA, 396 bp, Homo sapiens
ttttttggtagagatcaggttttgccttattgccccaagctgatcttgaattcctgggctgaagcaatctgcctgccctggcctctccaagtgttaggattacaggtataagccaccgtgcagccttatattttgttttaaattttcctctgtatttttctctctggcaaattgtttagggagtttctttagtttatcrgactaaatttcaaggctttccttccaattttgacatgtaaacagtccctcatttctgcttatctagtgattattcccaaatctgtgtttacagtctagctgtctctcctgagattaagacttgtttctctaactacctgacggcagaatctcctcttggaagtatcaaggaggcagttcaaaactgaactgggcatt

SEQ ID NO: 512 - DNA, 396 bp, Homo sapiens
gctgatcttgaattcctgggctgaagcaatctgcctgccctggcctctccaagtgttaggattacaggtataagccaccgtgcagccttatattttgttttaaattttcctctgtatttttctctctggcaaattgtttagggagtttctttagtttatcagactaaatttcaaggctttccttccaattttgacatgyaaacagtccctcatttctgcttatctagtgattattcccaaatctgtgtttacagtctagctgtctctcctgagattaagacttgtttctctaactacctgacggcagaatctcctcttggaagtatcaaggaggcagttcaaaactgaactgggcattggctccactccttctccttctctttactattaataccc

SEQ ID NO: 513 - DNA, 396 bp, Homo sapiens
taagtcttatttaggcatcgtttcttctgggagacctttgtagaatctctgaggttatgttaacatgctaaggttttcttgacattctcagattgggttaggtgaacttttagcaacttatctttttactaaaaagtcatccctcagtatctgtggggaattggttctaggactccctaaggatatcaaaatctgcatragcagcccaggtgagaccagcagaagcactttacagtcacctacaggatcatgacaaataataaatcatgtttaagccacaaagtcctttacataaaatggtatagtatttgcatataacctacacatcttcctgtatcctttaaatcatctctagtttataatacctcatacgatgaaaatactacgtaaatagtt

SEQ ID NO: 514 - DNA, 396 bp, Homo sapiens
aagcagttcctaattactggacattctcagatctgctagagctacatgtccaattacgagaatatactggaaaaagccctggattagaaatgagaggatgtaggttttagtaccaggtcagccaccttgttaatgcaaatttgagtaaattgttacttcttttaggccttgtttttgctgttttgtttttctgacagtmtggtctctgtggtccaggctggagtgcagaggcacaatatcaggtccctgcagtctctacctcccaggatcaagccattttcatgcctcatcctcctgagtagctgggattacaggcatgtgccaccacaccctcgaactcctgacctcaagtgatctgcttgcctcagcctcccaaagtgctgggattagaggtgt

SEQ ID NO: 515 - DNA, 396 bp, Homo sapiens
gaatatactggaaaaagccctggattagaaatgagaggatgtaggttttagtaccaggtcagccaccttgttaatgcaaatttgagtaaattgttacttcttttaggccttgtttttgctgttttgtttttctgacagtatggtctctgtggtccaggctggagtgcagaggcacaatatcaggtccctgcagtctctrcctcccaggatcaagccattttcatgcctcatcctcctgagtagctgggattacaggcatgtgccaccacaccctcgaactcctgacctcaagtgatctgcttgcctcagcctcccaaagtgctgggattagaggtgtgagccactgtgcctagccttacacattgttttcttactggtaaagtgggaatatctaga

SEQ ID NO: 516 - DNA, 396 bp, Homo sapiens
gttttgtttttctgacagtatggtctctgtggtccaggctggagtgcagaggcacaatatcaggtccctgcagtctctacctcccaggatcaagccattttcatgcctcatcctcctgagtagctgggattacaggcatgtgccaccacaccctcgaactcctgacctcaagtgatctgcttgcctcagcctcccaaaktgctgggattagaggtgtgagccactgtgcctagccttacacattgttttcttactggtaaagtgggaatatctagaagttgcatgctacataaattcaaccatatattattggcaaaaaattttaaagaaaaacatcagcttaagagtactaattgagtacatgccttggaatgagcatgagctggaaagaacaaa

SEQ ID NO: 517 - DNA, 396 bp, Homo sapiens
ggcaaaaaattttaaagaaaaacatcagcttaagagtactaattgagtacatgccttggaatgagcatgagctggaaagaacaaacctgttgttacatcactcattgctgttttcatatgctgctcattgtaaatcttgctcagtggcatgattttagtgtttaaagatttatttgtttgtttgtttaggacaaagtcyctacacataatctacttgcttcatatatacatacttatgcatattatgtatgtacatacatgctctcagggctcacatgaaaaaacagccattcaggtgatgtgatttatctcatatgcttactttagagtcaacagggtgttgactccactatacaatactggcatggagaacacataagtcaaagtagacaggac

SEQ ID NO: 518 - DNA, 396 bp, Homo sapiens
tttatttgtttgtttgtttaggacaaagtctctacacataatctacttgcttcatatatacatacttatgcatattatgtatgtacatacatgctctcagggctcacatgaaaaaacagccattcaggtgatgtgatttatctcatatgcttactttagagtcaacagggtgttgactccactatacaatactggcatrgagaacacataagtcaaagtagacaggacccagccgtaccattggctagggcacaaatatattcacatatgtggagaatgatgtacgtagaaaggtcttcattgcacaatgctctttaataaagatctggaaaaaaaaaacacctaaatgttcaaaaggatagggtagatgaaataatggtacattataaaatggaa

SEQ ID NO: 519 - DNA, 396 bp, Homo sapiens
tctgtcacccaggctggagtgcagtggcatgatcatgtctccttgcagccttgacttccctggctcaggtgggcctcccacctcagtctcccaagtagctggaactacagtcgtgcaccaccatagccagctaagatagtgagatggtggccccactgtcttgcccaggctggactcgatttcctgggtgcaagcaccsttcccgcctcagcctcccaaagtgctgggattacaggcatgagtcaccattccagcctacttgtctttaattcttaaaaatattaatgttgagttttgtctcccagcatgtgggaaagatgtcatccattgcttctgtttcctggaggcctgggagcaaggagcccaggaacagtatcacgaagcttgagataatac

SEQ ID NO: 520 - DNA, 396 bp, Homo sapiens
atcattgatgggcatttgggttggttccaagtctttgctattgtgatttttttttttttttttttttttttaagacagagcctcactctgttgcccaggctggagtgcgatggcatgatctcagctcactgcaacctccgcctctcaggttcaagcaattcttctgcctcagcctcccaagtagctgggactacaggcrcccaccaccaggcccagctaatttttgtatttttagtagagacagggtttcaccatgttggtcaggctggtcttgaactccagacctcatgatctgcctgccttggcctcccaaagtgctgaaattacaggtgtgagccaccatacctggcctaggcagtctttttcaaaactctaagactgtgcttgtgtctcagg

SEQ ID NO: 521 - DNA, 395 bp, Homo sapiens
ggtatgaggtaaggatccatttttttcccatttgcatagccagtttttgtagctccactttattttctcacttgatctgccatgccacctctagcatgtatcaacatatcatgtatgtgtgcagctgttccttaactctcaattttattctcttggttactttgtctaacccagcactcatactttttaaattattayggctaccttgtagggcaagaatcctcacttttattcaacttcttttgaagtgtcttgatgcatattttttctgatcttacttggccatatatattttggggacagatgtgacatcataccaagctttctttgcttgacattgtagatattttcttattcattaatgtgctaaaaattttgagtttggtcatacagtc

SEQ ID NO: 522 - DNA, 396 bp, Homo sapiens
gtttctaacattatagacactagttttaggctcttggaggctagcagcaattctcagaggtaatgcaagcttccccatttcttcccgtagtcctgtgaaagaccagccacctccagaagcctacacatgagtcttctcagccatactttctgcttttcctaatgcctctcagcagcgtattagaaaggccatgatcgaygtacctgttaccttcaggctttgcataaggtgtatatgaaacataatgaatttcgtgtttaggctcaggtcccatccccaggttacctctttatcttggagacacttctggtcccatacatttcagataagagatattcaacctgtacccaccacgtaaggagaggaataggttttagaagaggagtcagggaggca

SEQ ID NO: 523 - DNA, 396 bp, Homo sapiens
gcatctattaaaagtgatggttttagtatcctgtctcattttttcctttccttacatcatgtattataggtaaacacatgcgcatgtgtgtatttctcttttagacaaaggatgagattactactgttagctcagtttttttttccctacttaacatctttgcttttattttttagacatatttctaagactattaaayattagacttacgtagcccttctgtcattgtgaaatacatagtttactaacagctaccatcaagataaagcctttatttaaataattaaacttcttagtggaaagctaagtaagcacagtttatggattttgggaatttttgccttgcatttgtctgatatggtaaaatattgagtttgtttttctcataatgttcac

SEQ ID NO: 524 - DNA, 396 bp, Homo sapiens
gataactcaatccccttaaagggttgtatcaagccattgataagggctcactttgatataaccattttctgttatttagacactctttcacacttcctattttcctcctggggatggtttgaatggatgacacaataccatattataaaagcactttacaaactgtaacttatgttataaatgtaattattaccttaargttttaccctgtttcagatttgagtggaagtagttctttacaatacaaaacaacttattttaactttttttgcatttcaaagaatgatcaatccacttcaggtgcagcatggtttccaaccctgacagcatggaagaatcatttatttagcttctaaaaatgtgcaggctgtaccctagaccagccttggggattag

SEQ ID NO: 525 - DNA, 396 bp, Homo sapiens
tcctctctctcattctctctctctctctctttctctctctccttctttgctccttcattccttctctctctctcttttttttttgagacagcatctcactatattgcccaggctgttctcaaactcctgggctcaagtgatcctcctgcctcagcttcctgagtagctaggactacaggcacatgctatggcaatactrttttaaacattgttttcaaggctccccaggtgattccagtgtgggtcatgtggtagagaaccactgacacaggcaaacaaaggatacataaagttgtctatttaatgggtaggtgcaggtagtagataagagtgtagccacataaaccacatgcttagtgaacggttttgttttgtgtgtatgtgagggattagcat

SEQ ID NO: 526 - DNA, 396 bp, Homo sapiens
ttcaggttccatttagcacgacagcagggaagggactgttggcagaaaaaaactggggcagtgggattaaagacagaccacacattccaaaaggcaccgtgggagggtcagggggcgaggttaggtctaggcttcagtgtcctgggagactcagtcttcacagggtgacagcgatcaagagtgcagcttaggctgggtrcagtggctcatgcctgtagtcccagcactttgggaggccgagacgggaggattgcttgaagccaggagtttgagaccagtctgaccaacatggcaaaaccccatctctactaaaaatacaaaaatcaactgggcatggtggcgtgtgcctgtagtcccagctacttgagaggctgaggcaagagaatcacttgaacc

SEQ ID NO: 527 - DNA, 396 bp, Homo sapiens
taaatgatcattatgttcatattcacacatacaataatgtactcaagtttattgctaaggtaattcagaatctccttattttgaagtgtgcatttgatatacctgtttgggaataactagtttcttatctttgacagaaaataattttgttgttttgtttttactaaaaaagcatggtgaaaaatggctccatttctawgagaggtaactaaaatatcgcaatttgctgggtgtcattaaagtaactcacaagggaaaaaatgcaaattggtatctgctgatggagtaaatctccgcagaagtgatgaccctgaaaggatcaatatattaaagcccctcccagctggtcattccagattgcaacaataaagcattaagtgttaaaacctcaaggca

SEQ ID NO: 528 - DNA, 396 bp, Homo sapiens
ctcatcaagcccacctttatacttcatttctccagacttcatgtccagactgtgggatgaacaagtggttataaggttttagaggctcctgtaggactagatggaaggcaaaaaaaggaaataacctttaagcatgctctcgattccttaaatcccatctgaaagtcttaaggatgtcttctcagtcatacttatttgrcaatattacctaattttctccattagcccaagctcaggggtctttcttcttccatattcacatgggtgcaatggttttctgaaaggaaaacagcattactagggcagtaacatttaattaatcacaggtacttatcaaactacaaaacaggcattccaggaactgggtgtttctgtttgtaaaattacactctcgtg

SEQ ID NO: 529 - DNA, 396 bp, Homo sapiens
taggactagatggaaggcaaaaaaaggaaataacctttaagcatgctctcgattccttaaatcccatctgaaagtcttaaggatgtcttctcagtcatacttatttgacaatattacctaattttctccattagcccaagctcaggggtctttcttcttccatattcacatgggtgcaatggttttctgaaaggaaaayagcattactagggcagtaacatttaattaatcacaggtacttatcaaactacaaaacaggcattccaggaactgggtgtttctgtttgtaaaattacactctcgtgtacatgctcccactaaaatgtaagttcgctgaggatggaggttttggtctctttgctctgtgctgtaaccccaacactgcagcagggcctg

SEQ ID NO: 530 - DNA, 396 bp, Homo sapiens
gctgcatagtctcacttaggtgtggaatctaaaaaagtcaaattaaaaaaaaatgtcaagcagagaatagaatggtagttgccagggactctgggaagtagcaggggtgggggtggaggggaggggatgggcagaagttggtcaaaaggtacaaagtttcaggtagacaggtgtaagttctggggatctattgtacagmgtggtgactgtagttaatactgtattgtgtacttaaaaattgctcaccaaaaatgttctcaccaaaaaaatgatgtttggatatgttaaacagtttgatttaatcattttgacgtgtgtgtgtgtgtgtgtgtgtgtgtgtgtgtgtatacatcaaaacatcacattatataccatatacaattaatatatacaatt

SEQ ID NO: 531 - DNA, 396 bp, Homo sapiens
ggggtaaatgctgactgcctgttctctggacaggaatggagaagatggtgctagcagggttgctgttcatatgtagacattcatgcagtcactctcttttcagcacacttcttacttctgccctgggttcagttgctgactctgagcccagaaaccttctagggttctgttaggtagattggcttccaccgtctttgcracaaccacagaaaattctagactgttttctcttcgggcttcattagtcaacttgcttcagtctgtcttgcatcttctaaatatttatagatctctctcttttgttggagtggcagaaaatgctagttgaccacccaatattcaaattatcctgcctccttaataacagaatatcattggatgtggtgggtaaataat

SEQ ID NO: 532 - DNA, 396 bp, Homo sapiens
atggagaagatggtgctagcagggttgctgttcatatgtagacattcatgcagtcactctcttttcagcacacttcttacttctgccctgggttcagttgctgactctgagcccagaaaccttctagggttctgttaggtagattggcttccaccgtctttgcgacaaccacagaaaattctagactgttttctcttcrggcttcattagtcaacttgcttcagtctgtcttgcatcttctaaatatttatagatctctctcttttgttggagtggcagaaaatgctagttgaccacccaatattcaaattatcctgcctccttaataacagaatatcattggatgtggtgggtaaataatataccctaactttccttgcagagaggggtggccaa

SEQ ID NO: 533 - DNA, 396 bp, Homo sapiens
cagggttgctgttcatatgtagacattcatgcagtcactctcttttcagcacacttcttacttctgccctgggttcagttgctgactctgagcccagaaaccttctagggttctgttaggtagattggcttccaccgtctttgcgacaaccacagaaaattctagactgttttctcttcgggcttcattagtcaacttkcttcagtctgtcttgcatcttctaaatatttatagatctctctcttttgttggagtggcagaaaatgctagttgaccacccaatattcaaattatcctgcctccttaataacagaatatcattggatgtggtgggtaaataatataccctaactttccttgcagagaggggtggccaatgagatggaaatgaaagtc

SEQ ID NO: 534 - DNA, 396 bp, Homo sapiens
tgggattgagttcttgatttgattttgagcttggccatcattggtgtatagcagtgctagtgatttgtgtacattgattttgtaacctaacactactaaattcacttatcaaatctgggagatttttgaggattccttaggattttctaggtatgagatcatatcattggtagaggtagtttgagtttctcttttccartttggatgccctttatttctttctcttgcctgattgctctgactagggcttctagtactatgttgaatagaaatggtgaaaagtgggcatccttgtctcattctaatttttagggggaaatgctttcaacttttccccattcattttgatgttggctgtgagtttgtcatagatgattcttactattttgagatata

SEQ ID NO: 535 - DNA, 396 bp, Homo sapiens
tcttttgccctgcctttctgcctttctgtccttttaatttgcgggcttttggcaaccacagcacgggtctggtttcctaggagtttcttttgtaggatcaaaccgctagttggctcttggccctgtgatagggccctgggctaacttattgggaaaatgttgctgtaacccctgcccagaggtgcctgtgacatgggcygccatcttctcctcttcccttggcttcagccccacctagaaacctgaacaaacattttccttgacatttcataaagtgtcagtggctcctcatttagcaaaatacatcccagggaagttcaaaagtgaaaaaaggccgtaacttcttcttcttctcagggacctacagaaaatatgtggcacctcggcagcctggcc

SEQ ID NO: 536 - DNA, 396 bp, Homo sapiens
catggattttgttttccaagtggcaagatggcgcctccacctttggtatcctattttagttcctggcagaaagaaaggaacaggctaatggccctgatgagtctacccccttttaacaggagaaaatttaaaaaacaaaaaccatgaaaccctttcccagaggcaacaaccagaattccatttatctttcattgaccaraacagaccacatggtcactggtggtggcaatggagactggggagatgaatatttttaaggtggcatattccagaagaacactgtgcactgattgcattaatgaacccattaatgtgccaaggggaggtttacctatgagcatgggcaaattagaacccactcttggagctgcaggtgagccaatcccacctaaacag

SEQ ID NO: 537 - DNA, 396 bp, Homo sapiens
tggtggtggcaatggagactggggagatgaatatttttaaggtggcatattccagaagaacactgtgcactgattgcattaatgaacccattaatgtgccaaggggaggtttacctatgagcatgggcaaattagaacccactcttggagctgcaggtgagccaatcccacctaaacagtgtggatgctacaagatggrgaagtaaattgattctattccataccctaacctctctccaagatgtattcttaaaatagaagagggaagacagaagaaaacatccagaatatatttttattgtcttttacttcttcagtgcattttagatcagtgcttctcaatctggcaaggggcatgcaggaggatgtgagttttatcaggaaaactacacaacc

SEQ ID NO: 538 - DNA, 396 bp, Homo sapiens
tgagccaatcccacctaaacagtgtggatgctacaagatggggaagtaaattgattctattccataccctaacctctctccaagatgtattcttaaaatagaagagggaagacagaagaaaacatccagaatatatttttattgtcttttacttcttcagtgcattttagatcagtgcttctcaatctggcaaggggcrtgcaggaggatgtgagttttatcaggaaaactacacaaccccccaaccacaatgctacccccactcctgtggaccttctttaagagagactcactattatagatggagttgatacgattttaagagaggccatatattatttgctttctgtcttgaaaaacttgtgatttttctgtattgtgctactgccaaagaga

SEQ ID NO: 539 - DNA, 396 bp, Homo sapiens
gggttgcagtgagcagagatcacaccattgcactccagcctgggtggcagagcgagattctgtctaaaaaacaacaccgtatttggggcatgctgatactaaaaaattattcattgtttgtctgaaattaaaatttaaattgggggccctgtattttactgggcaacccatttgcaatatcagcaacaatctcttattsagaccactgattaagtgtgcaaaatttgaatctctgaacagtacctatgtccttgatatcttaaattaatgagtgtcttagacactcaaagcaggaggaagcattatggcagatgtttgagccccagagatgtccatgagcacagcatagagctcagagccttctttattatttgcttcacgacagagcaaaggact

SEQ ID NO: 540 - DNA, 396 bp, Homo sapiens
catttgcaatatcagcaacaatctcttattcagaccactgattaagtgtgcaaaatttgaatctctgaacagtacctatgtccttgatatcttaaattaatgagtgtcttagacactcaaagcaggaggaagcattatggcagatgtttgagccccagagatgtccatgagcacagcatagagctcagagccttctttrttatttgcttcacgacagagcaaaggactgcagcaggttgactgatataaaagttttaccatgtctcacagcaggcctttgctcaagtttccagtaaggatattgtatcatttcttgcctgcagtacttgtaaatccacttacactgcctgctgttgagtcatttgtttcgtcttgagtagcatgtcatccttgttc

SEQ ID NO: 541 - DNA, 396 bp, Homo sapiens
ttgcagttctcattgctggggagtctaaactggaataaaacacccactatctccatcaggcttgcactagagcccagctctagctggagagaaagaagctaacccgcacagacacaggactgtaggcagggagcatccgggggtatttgggtcctggctctgatgtgcctaaggccaacttctctctggccatgctggygtgcatgagctcactaatcttcctttttgccttccattttctccaatcctgacttagcaaaggttgggcaaaagagactctgtgtgagttcgagcaaagcctgagatgctggattttccaagatacgagaaggggctgggggctgggtgaactggtggtggaggagggaaggattaatttcccaaggaggggaaggg

SEQ ID NO: 542 - DNA, 396 bp, Homo sapiens
gagaaagaagctaacccgcacagacacaggactgtaggcagggagcatccgggggtatttgggtcctggctctgatgtgcctaaggccaacttctctctggccatgctggcgtgcatgagctcactaatcttcctttttgccttccattttctccaatcctgacttagcaaaggttgggcaaaagagactctgtgtgarttcgagcaaagcctgagatgctggattttccaagatacgagaaggggctgggggctgggtgaactggtggtggaggagggaaggattaatttcccaaggaggggaaggggccaggacatcaggccccggggactttgaagagagggtcgtgggtaggaggtagatcaagtggagtgacacaaaggtcaggaaagagg

SEQ ID NO: 543 - DNA, 396 bp, Homo sapiens
catgcctcctacaaatttgacctgggcccagggccatgttcggtggtttttaagaaccgaggctcccagaagcagtattgggcagctagagtggccccaggatctatatcaaactctacctgtttctgaaccaaatttcttctagaattttattccataaatctgaattatggtgtcagactcctagcatacactaaakgaactctctgccttgcattaaataacaggagttacccctggaggtaactcctagccctggctctttagagaacagatgccgaataggcattaggggatgtgatggatgtgctaactttcaaaaaaaaaaaaaaaaaaaggcctgagctgagtgctcagagattcacaaaaagctgacagcatctctctgttccattg

SEQ ID NO: 544 - DNA, 396 bp, Homo sapiens
ctttggagcctggcagcctggctttgagaaccgggctttaacttgtcacatgactatggccaagttcctggggctctccaagcttcacttcctctgtaaaaagggcaataatataatacctgtcttattgggttttgtccatgttagatgagacattgggtacaaagcacttggtcccgtgcctggcacatttactgcrcttaatgtatgatagttttcttattattctaataaacaatatggctttgggagtatagttctgccacattgcagtggccagagtgaaggtggtgagtgccttctggggccctgggagtcaaggttatccgcatgccctttcttgcttgctcctcagtgtggctgcctctatgtccacaccatgcagatgcaacaggt

SEQ ID NO: 545 - DNA, 396 bp, Homo sapiens
acatgatcatccccttgggcttctggttttttttctttcaggaccttattttcaggcaagtggcctttgacctctaaggctgtcctttcctagctaccgaatccagcattcaaagtgatggaaatatgtatatatagtaatagtaaaatatcagcacttaatggcctgataagaatgtcactgcaatgctgagtttggrccaacatttgcctgctcctgccattgagcccgggctcccctccagagctgagctgctgcaagggatctgagtaactagggctgtgtcagagtggcgatgacagccaccacatgctaaggaagagatccccaaggacaaggagaatcccacgtggagctacttgcttctttgtcagtcttgtttttcttatttcacaa

SEQ ID NO: 546 - DNA, 396 bp, Homo sapiens
ccgaatccagcattcaaagtgatggaaatatgtatatatagtaatagtaaaatatcagcacttaatggcctgataagaatgtcactgcaatgctgagtttggaccaacatttgcctgctcctgccattgagcccgggctcccctccagagctgagctgctgcaagggatctgagtaactagggctgtgtcagagtggcratgacagccaccacatgctaaggaagagatccccaaggacaaggagaatcccacgtggagctacttgcttctttgtcagtcttgtttttcttatttcacaaccttctaaaacacaatctctcaacctctattgttagcttgcatttttcaatcatgagcacagctttacctggctccatgctttgattgactctacc

SEQ ID NO: 547 - DNA, 396 bp, Homo sapiens
tcttatttcacaaccttctaaaacacaatctctcaacctctattgttagcttgcatttttcaatcatgagcacagctttacctggctccatgctttgattgactctacctgccaacactgcaacaacagggaaagggacaccggcctcataccattagatggtgtgtagcctgggcatgaggataattaaaaactcccwaggggattttaacatgtaacacagtttggaaaccattgatgtaagatcttcttactcaacatgtgctccaaggagctgttgtatcagcttatcagaaatgtagatcaggccgcacttggacctgtagaatcagaatctgcattttatcagattccgacattatttgtatgaacattagcttttgagaagtgttgctt

SEQ ID NO: 548 - DNA, 396 bp, Homo sapiens
cttttgacaccaactacaagtcaaggggttccccaaaccaccctgagttgtgataattcgctgggagatctgacagaactcactgaaggttgttatactcatggttgtgatctcttatagggagggaatacagattaaaatcagccaaaggaagaagcacacagcacagagtccaggacagtgcctgacatggagcccytacggtcctctcccgtggagtcacggacagcgccactctcctggcattgatgtgtgacaacacacagggagtgttccccaccagggaagccttggtgtccagggtctttactgtggctctgtcacatgagcacagctgactgcccatgcggccgatctgttcccagactctccaccgctacacatcactcacagtcc

SEQ ID NO: 549 - DNA, 396 bp, Homo sapiens
gtggctcacagaactcagggaaacacagctaccagtttattgcgaaggacattttaaaggataaaagtaggcagataaagagatgcatagggcgaggtgtggaaaggtccctagtgcaggagcttctgtccatgtggagcgggggtgcaccaccctctcagtacatgaatgagttctccttcacctgcctatcagcctytacatgttcagctccccaacccagtcctcttgggtttttatggaagcttcaagacacccacattctttccccagagtatagggcaagaccttctctggggagggttttaagacccacagtcagaaaggtggggtggggtcaagattagagtcctgccttgacgggcaggtgaaaggggtagggggagtaggtgagaa

SEQ ID NO: 550 - DNA, 396 bp, Homo sapiens
cgggggtgcaccaccctctcagtacatgaatgagttctccttcacctgcctatcagcctctacatgttcagctccccaacccagtcctcttgggtttttatggaagcttcaagacacccacattctttccccagagtatagggcaagaccttctctggggagggttttaagacccacagtcagaaaggtggggtggggkcaagattagagtcctgccttgacgggcaggtgaaaggggtagggggagtaggtgagaaaaattctgtttattttttctttttttttttgagacggagtttcactcttgttgcccagggtggagtgcaatggcacaatctcagctcactgcaacctccgcctcccaggtttaagcgattctcctgcctcagcctcccg

SEQ ID NO: 551 - DNA, 396 bp, Homo sapiens
atgagttctccttcacctgcctatcagcctctacatgttcagctccccaacccagtcctcttgggtttttatggaagcttcaagacacccacattctttccccagagtatagggcaagaccttctctggggagggttttaagacccacagtcagaaaggtggggtggggtcaagattagagtcctgccttgacgggcargtgaaaggggtagggggagtaggtgagaaaaattctgtttattttttctttttttttttgagacggagtttcactcttgttgcccagggtggagtgcaatggcacaatctcagctcactgcaacctccgcctcccaggtttaagcgattctcctgcctcagcctcccgagtagctgggattacaggcgtgtgccacc

SEQ ID NO: 552 - DNA, 396 bp, Homo sapiens
tcttcattccacaaagctcagtgtcaaaacatggggtttacactggaagctgaggtcacatcagtagccgggatcagggtcgccctagctgcccaatgcagctcccaggcctcctgtaaaaccttgacctttgaggtcatgacagccctctcctgctatgctcatagctgaccactgaactcctggacactccctcccscaagttcacagagaatgtgggcacatgccttacagtcttcccttgatccaaactactgccttcatcttgagtgacagcagcatcttttggatgtcttggcctgtctagctttatttttttgtgttctgccatcaagttgctacttctgttgccatcgtgcctgtcagcgcagtgcaggctgtggtgaaatcccacga

SEQ ID NO: 553 - DNA, 396 bp, Homo sapiens
tatttttttgtgttctgccatcaagttgctacttctgttgccatcgtgcctgtcagcgcagtgcaggctgtggtgaaatcccacgaactcaggcatcacactgaccgggtctgagtcctgtctcagttgtcagctagttgtgcaatgaagggaaagggacctacactttccaagcctcaattcactcatctatggcatkgtgacaataatggaggttgatttaaagtcctttgtaagaattaagagttataatagacataaagtgctgtatctggtatacctagaaaacattccataaaagttagtaattgttggtcatgtaatgatgactctctaggctaggatttcagcttcattgcatgcacatggtgcactcacagggcgtgacctctctct

SEQ ID NO: 554 - DNA, 396 bp, Homo sapiens
ggtatacctagaaaacattccataaaagttagtaattgttggtcatgtaatgatgactctctaggctaggatttcagcttcattgcatgcacatggtgcactcacagggcgtgacctctctctgtctcagtaacctcatctgaggaccgggataatcataccgcttcaaagggatgtcataaagattaaataatatgtrtaaggctgcttgcatttagctgcattcaacaaatatttctgtatctttctcctcatttctccttactttcttgcttattatctgctctaggtatagatttcagagaactaagcttgttacaatccttcataaaataaccaggttggttagggcatttccaagagtcaatactgtttagtgactattctctgtttaat

SEQ ID NO: 555 - DNA, 396 bp, Homo sapiens
aaggctgcttgcatttagctgcattcaacaaatatttctgtatctttctcctcatttctccttactttcttgcttattatctgctctaggtatagatttcagagaactaagcttgttacaatccttcataaaataaccaggttggttagggcatttccaagagtcaatactgtttagtgactattctctgtttaatctmttttgattgtccagggtcatcttttgctatgtcataggttgttggcttcttctagagaagtgagacgatggacaagttccaagtgagtgaggcgactggtcaggatattccgctgaaaaactcatgtcagttctaattcgtgattgtaattcaatcacagcctgagaacagtaggactgtagttcaaatgctctgtt

SEQ ID NO: 556 - DNA, 396 bp, Homo sapiens
cctgggttcaagcaattctcctgcctcagcctcccaagtagctgggactacaggcacatgccaccacgcccagataattttcgtatttttagtagagacggggtttccccttgttggccagggtggtcttgatctcttgacctcatgatccgcccacctcggcctcccaaagtgctgggattacaggcgtgagccaccrcgcccggcctctagaggataatttttaaatgtgcttttgcatttggaaaatgtgattggcatttttttctaattttctaatatgatacgctgtcggatgctatggattacttaaaccctctggctacctagaaagatctttaagtggttctcaacaagcttcatacgcaatgtaaattgtattatctctcaggatgt

SEQ ID NO: 557 - DNA, 396 bp, Homo sapiens
tgtgattggcatttttttctaattttctaatatgatacgctgtcggatgctatggattacttaaaccctctggctacctagaaagatctttaagtggttctcaacaagcttcatacgcaatgtaaattgtattatctctcaggatgtgtgagaacatctgtttttcttctaatgcagtaaacatataagggtctcttgrgatatcttttaaatagacttaatacaacattcaggaatgataacaaaatataatcacagttgtaagggaatgtgagcatttcatattaataacattggaaccttatgtttaatacagtgttaaaagttgacaaacatgtaggagtcagaaaattcaattaaaattatcacagtaatatgaatttagccacatcctgt

SEQ ID NO: 558 - DNA, 396 bp, Homo sapiens
acttaaaccctctggctacctagaaagatctttaagtggttctcaacaagcttcatacgcaatgtaaattgtattatctctcaggatgtgtgagaacatctgtttttcttctaatgcagtaaacatataagggtctcttgggatatcttttaaatagacttaatacaacattcaggaatgataacaaaatataatcacrgttgtaagggaatgtgagcatttcatattaataacattggaaccttatgtttaatacagtgttaaaagttgacaaacatgtaggagtcagaaaattcaattaaaattatcacagtaatatgaatttagccacatcctgtgttagttatgaaatccatttaacaccacaaacagtaatatttttagccagtttattca

SEQ ID NO: 559 - DNA, 396 bp, Homo sapiens
catttaacaccacaaacagtaatatttttagccagtttattcaaaaggaaaacaggaactaaaccactttcatgcaatatatactctgttaatgtggtcaggctaattttgctgggggaaggaacttaacttttgaatatttgaatgcccagtcatttaatctgaatatcctatttccttgcatgttgcaaaatttttktcaataaaaggcagaaaaagaaatctcttctccatgctcatccctaagagaatgggttgtctgtaccctgagagcattttatggaggggacaaccacttttctaattttccttcccacttctctgtgggcacaaatgctctttggttgaaagagttgtaattcagtcccaagatgaggtgtggttactgcatcccta

SEQ ID NO: 560 - DNA, 396 bp, Homo sapiens
tcaatccatgctccacactgcagccagagtgctctacaatgcaaatccatttgtgagactcctcctcttaaaatcctcaagtggcttctctttgcccccaggatcattttgaaactccttaatggaagaggcatggccctttgggatgtggttccccaacccctcccacatcatcttttcaatcagatttcccactaartggaaattttttcaggtcctcaactttatggtgactttctcttgctcaggatctttgaacatactgtttcttctttccttttgtatttgccaagacaacacttcctctggtaagattttcctgacatcctctataaaaaaagattgagatagttgactacccaaaatgtttcccattcattccaagctctattcaag

SEQ ID NO: 561 - DNA, 396 bp, Homo sapiens
aacacttcctctggtaagattttcctgacatcctctataaaaaaagattgagatagttgactacccaaaatgtttcccattcattccaagctctattcaaggcagtaaagtgcccggctgacagattgcattcctcatcttttctgaagctagcaatggccatgcaacagcattctggccaataagatagaagtcgaarttgaagggtgggatttccaagaaagctcgttgaagacataattcctcatttcacttcttactctttctctttcctgcttcctaaaatgcggtgcagatggcagacacttcaaagctgtctcaggcaatcaggtgatgttaaggcagaaaccagctttatgatgggtagaacaggaagaaagaaggcacctatgttct

SEQ ID NO: 562 - DNA, 396 bp, Homo sapiens
cctacaaatctcatgttgacattttatccctaatattggaggcagggcctagtaggaggtgttttggtcatagtgataaatggcttggtgccgttctcacagtaacgagtgagtttttattctagtggttcctgcaagaactgattgttaaaagagcttggatccttccacccctctctcactcttgcttcctctctcwcaccttgtaatctctacaagctcttcacctccccttctccttttgccataagtggaagatttctgaggcctcaccagaagcagatgttggttccatgcttcttgtacagcctgcagaaccatgagccaaatcaacttcttttctttataattatccagtctcaggtattcctttatagcaacacaaatggactaaga

SEQ ID NO: 563 - DNA, 396 bp, Homo sapiens
gttgtttccagctttgaactattttgaatcctaaaagactgccagttttgaatgagaccccagaacaatgaatgtaggctctgtatacaagttcaggctgctgggcaacttaggccttaagacacaactctgccacttaggccttaagacacaactgacatgatggtgcttaaagtggctgtgatggaaaaggaggctrtttggagcctttggagtgcctttataggtgaaccccagcatagcacctaatgatttggagcaaagctgtgtcattccccaaagataactattcgccttttgagaaacatcttctagctactatcaataataaacacagaatgcatcaccatgggccaccgtgttgtcttttgacctgagtttccattgtgaacaaga

SEQ ID NO: 564 - DNA, 396 bp, Homo sapiens
aactctgccacttaggccttaagacacaactgacatgatggtgcttaaagtggctgtgatggaaaaggaggctgtttggagcctttggagtgcctttataggtgaaccccagcatagcacctaatgatttggagcaaagctgtgtcattccccaaagataactattcgccttttgagaaacatcttctagctactatcrataataaacacagaatgcatcaccatgggccaccgtgttgtcttttgacctgagtttccattgtgaacaagagtcatttgatccaaggcagaaagttgggtgcacacagcagtgttccatcatcaaatggaatatgagattgggcccaagtaggtcctgcagacacaaataagttgcaagagcaagtagtacaggcg

SEQ ID NO: 565 - DNA, 396 bp, Homo sapiens
gaaaaggaggctgtttggagcctttggagtgcctttataggtgaaccccagcatagcacctaatgatttggagcaaagctgtgtcattccccaaagataactattcgccttttgagaaacatcttctagctactatcaataataaacacagaatgcatcaccatgggccaccgtgttgtcttttgacctgagtttccaytgtgaacaagagtcatttgatccaaggcagaaagttgggtgcacacagcagtgttccatcatcaaatggaatatgagattgggcccaagtaggtcctgcagacacaaataagttgcaagagcaagtagtacaggcgcttggcctggccagtactgttgccaagttgactgcttcccctcagtctgcatctgtggctt

SEQ ID NO: 566 - DNA, 396 bp, Homo sapiens
ccccaaagataactattcgccttttgagaaacatcttctagctactatcaataataaacacagaatgcatcaccatgggccaccgtgttgtcttttgacctgagtttccattgtgaacaagagtcatttgatccaaggcagaaagttgggtgcacacagcagtgttccatcatcaaatggaatatgagattgggcccargtaggtcctgcagacacaaataagttgcaagagcaagtagtacaggcgcttggcctggccagtactgttgccaagttgactgcttcccctcagtctgcatctgtggcttcatggggagtttcctatgaccacttgatggaggaaaaaacaaattggagcatagtttatagtgctggtactacccaaagtggctagct

SEQ ID NO: 567 - DNA, 396 bp, Homo sapiens
gtccgtgagttacagatctacacaaaatcacagagagtggttaatcgtttagtctgatggtcagggacttccaagagacatgattagaaaactggtgacaaggagtcctggggaagaggcatatggatacctctgaacacacacaaaacatgagaatatgtatcccatatgaatgttaaccaaagagcagccacaacasaagaggattttaaaatcagctgaataagatgattcattctgacagcatcagctagtctctttccccagccactgttgcccagtgggcttacatatatcatggccatgggggcagggctatgtatggacacagcaacatgaatttccactcatcaaggccaatttggctccagccattgctgagtgctcagcctgcca

SEQ ID NO: 568 - DNA, 396 bp, Homo sapiens
acatgattagaaaactggtgacaaggagtcctggggaagaggcatatggatacctctgaacacacacaaaacatgagaatatgtatcccatatgaatgttaaccaaagagcagccacaacagaagaggattttaaaatcagctgaataagatgattcattctgacagcatcagctagtctctttccccagccactgttrcccagtgggcttacatatatcatggccatgggggcagggctatgtatggacacagcaacatgaatttccactcatcaaggccaatttggctccagccattgctgagtgctcagcctgccaagatagaaatctacgccaatatggcaccattccctgggctagaaaaccaactggtggaaggttgattacattggacc

SEQ ID NO: 569 - DNA, 396 bp, Homo sapiens
gggaatacaatggtggttccactaaactgacagctgagtttgccatctcctcgtgccagtgaatacacaagcaaggaagggggttcctttctcacctagggtgactgatcctaattaccaaggagaaattggactgccacttcacaatgagggtgaggagtatgtactctatgtgtctgtgattaatgtcaatagaaartgacaccaacctagtacacagaggactgatcatggtccaggcccttcaggaatgaagatttgagtcaccaggcaaggaacttggactcactgaggagggcatattccaaggagaatattttatctatgtccatctatgtccatctatattccatctgtgttccccttggaattcctattcatgaacatggggaattc

SEQ ID NO: 570 - DNA, 396 bp, Homo sapiens
tatagaatgagtagtggaaggtagttataaatgtaagtcaaaaaccacacaaccaatttgagaaatgaggaaggtaatagtgttgaatatgtcttctttatcttgatataaatgtatttgtgcatatattaaccagtttatttatttattattattttttgagatgagctctcgccatgttgcccaggctggtcttgamctcctgggctcaactgattctaccatttagtcctccgagtagctgggactacaggcatgcaccaccatacccagctgaccagttttttcctattcctctacttaatttctctactatacaacataatatgtgttaatggtagttaactttatatctcagtattaagtcacaagatatcaaaaagggaatgcgactta

SEQ ID NO: 571 - DNA, 396 bp, Homo sapiens
atgtcttctttatcttgatataaatgtatttgtgcatatattaaccagtttatttatttattattattttttgagatgagctctcgccatgttgcccaggctggtcttgaactcctgggctcaactgattctaccatttagtcctccgagtagctgggactacaggcatgcaccaccatacccagctgaccagtttttycctattcctctacttaatttctctactatacaacataatatgtgttaatggtagttaactttatatctcagtattaagtcacaagatatcaaaaagggaatgcgacttagttacaagcagaatgaatatcactcaaagatgaataaagagaagagggttagtgcattttctgttggatgagagaaagtttcattgtt

SEQ ID NO: 572 - DNA, 396 bp, Homo sapiens
gcagtggcgtgatcccagctcactgcaatctctgcctcctgggttcaagtgattctcctgcctcagcctcccgaggggctgggattgtaggcgtgcaccactatgcccatctaatttttgtatttttagtagagatagggttttgccattttggccagactgtcttgaactcctgacctcaggtgatctgcctgcctcrgcctcccacagttttgtgattataggcatgagccaccgtgcccggccttaacctttgttttcttacacaacacactacgtgatgttttccacatgcatgggtcatttgcttcatttacgtacaaatgcataagcaatatactgtgtggtgtgagtttgtgatgggaaaaggaagaagttttgcggatactacactgg

SEQ ID NO: 573 - DNA, 396 bp, Homo sapiens
gcccaggctgttctccaactcctggactcaagccatcctctagcctcggccttccaaagtgctgggactataggcgtgagccacggtgccaggcccttgaccacatttttaacccctctgaacctcagtttcactttctgggcaatgggaggggggtaatttgtccctcagagggttgcactgaggggcaaatgtgagsctctgggtacaatgcccagtacagactaggtccccacgacacagccgctcagcggctccggattctgggctgctctggactgcggccaggcggtcttctgcgggaatccgggcaggcagggcgggctgcgctcccctccccggctctcccggtgccccttgtctttttgttctgtctcagcagctctctattaagat

SEQ ID NO: 574 - DNA, 396 bp, Homo sapiens
tttttgttctgtctcagcagctctctattaagatgaatggcatttccaaaggcttcacctctgataagtgttcctctgcagctgcagccagaatcttaatgtgcgcgctgtaatttaatggccgtctcggctattaacacgctcttctcgggtgaagtggactccctccatccccgggcctctgcacgtgctctgcgcrctggctgggggtgactccaaggagctcagagcggggtgcccggcacctctcgccaggcgcctttcgaccttctaaagcgcgaatggctggacttttctcccatgtgtggggccccagaaggtgtggggccccagaaggtgtggggtccctgcgttccacggagcccggaaggtttccagtgatggtgggggctgacc

SEQ ID NO: 575 - DNA, 396 bp, Homo sapiens
ggagcccggaaggtttccagtgatggtgggggctgaccacgttggtccccgtgggtgctgttttcatgtgccggcagattgggatgagtttaaaagacagaagcgtgtaggatagagaaacttctttaaaaactggaaattttaatctggggattataactattggacagtcaagtgcaagagtgaatacacttctcastccctcctcccaatttttatttgcgggattagtcagtccccctctgccacatgataattgtgagaactaccagggtcttcattctcctgccatctggttgacctctccaagaatggacacccgggcagcctgggccaatgaggctgtcctaagagtttagatgagagaagtcagtctttgacaggtgatggaagctg

SEQ ID NO: 576 - DNA, 396 bp, Homo sapiens
cagtgatggtgggggctgaccacgttggtccccgtgggtgctgttttcatgtgccggcagattgggatgagtttaaaagacagaagcgtgtaggatagagaaacttctttaaaaactggaaattttaatctggggattataactattggacagtcaagtgcaagagtgaatacacttctcactccctcctcccaatttytatttgcgggattagtcagtccccctctgccacatgataattgtgagaactaccagggtcttcattctcctgccatctggttgacctctccaagaatggacacccgggcagcctgggccaatgaggctgtcctaagagtttagatgagagaagtcagtctttgacaggtgatggaagctgtaaaatgtaaaactcca

SEQ ID NO: 577 - DNA, 396 bp, Homo sapiens
taagagaagctgagagagagcgagaggagagattggaagaaagacagagacagaggtagagagaagggaaagagagagagaaagggacagaagagagagaaaaaagagggggccgggcgcggtggctcacgcctgtaatctcagcactttgggaggccgaggcgggcagatcacgaggtcaggagatcgagaccatccyggctaacacggtgaaacccccgtctctactaaaaaatataaaaaaaattagccaggcgtggtggtgggtgcctgtagtcccagctactgaggaggctgagacaggagaatggcgtgaacccgggaggcagagcttgcagtgagctgagatcgcgccactgcactccagcctgggcaacagagcaagactccgtctca

SEQ ID NO: 578 - DNA, 396 bp, Homo sapiens
tccaccagcagcttttctgagtctccagcttgcagatggcaaaccatgaaacttcatggtgtccatgagcatgtgaaccaatttctattataaatctgcaatatatatatatgaggagacttatttatatattggttcagtttctctggagagccttggctaatataaagtctatactctacaaagtgccctaggtackcagggagtacccaagtgtgtcatgaccagcccgacagccctggctgctggcttccccgcacacaactctgcacgctgccttcatcagcctttctctctcagctgaaccgagggcattgaagcgggcctctggcactgtacctatgagggagcaatatcttcccctacactgacctcttccgtgccgagatgcagccc

SEQ ID NO: 579 - DNA, 396 bp, Homo sapiens
gcctctggcactgtacctatgagggagcaatatcttcccctacactgacctcttccgtgccgagatgcagccctccctgctgccactagttacagtggtccatgttccctttcaaagtgaagttttgataaaagcacctcttaaccaatgccaaatagctaagtctgggacaaagattgcaggtattttgcattttccwtgtaacctcagagggattgccattcacactgatctgagctgcagaataccaggcagccacctcacccacccagcaggtccactcttatactttctcagaaagcacagccactctactcttattcagttgaaaagaatttccaggaaggtgtttctgcgattgcctcagaaaagtcagttccctttgggaatttccct

SEQ ID NO: 580 - DNA, 396 bp, Homo sapiens
tacttttctctgaagaaatggagatatcagctgtccctccccactgccatttattccttccttcattcaaaccttatgtggctgctacttaccgtgtgttaagtgttcactttttttcttggaattcaaaaaaagaaggacagtatttggggcacagatcttttggtgttctatacatttttttaaagtttcattttayatttgtgtgtgcgtgtgtgtgtgtgtgtgagacagtcttgctctgttgcccaggctggagtgcagtggcataatcattggctcactgtagcctcaaagtcctgggcccaagcaatcttcccacctcagccacccaaaatgctggggttacaggtttatgccactctgtctgacctgaaagttttgggtttactttcc

SEQ ID NO: 581 - DNA, 396 bp, Homo sapiens
gcataatcattggctcactgtagcctcaaagtcctgggcccaagcaatcttcccacctcagccacccaaaatgctggggttacaggtttatgccactctgtctgacctgaaagttttgggtttactttcccttctttctctttgctgaagtcagagatgatggcagcttccagattctctggtgcctgtgctgggctcrtgctggtcatggtcttgggtccaggattcattctggagactctcagggaagtttcccatgacaaggaaatgtaggagagtgtgctggctttgcgtgctcctctgccaagccctgcttctcctggtgggacacactgaaccacagccagggcattttggtggttagttaaaaaaaaaaaaaaaaaaaaaaaaaggaag

SEQ ID NO: 582 - DNA, 396 bp, Homo sapiens
cttcagaaattgtaatgatgaaagagtgcaagctctcacttccccttcctgtacagggcaggttgtgcagctggaggcagagcagtcctctctggggagcctgaagcaaacatggatcaagaaactgtaggcaatgttgtcctgttggccatcgtcaccctcatcagcgtggtccagaatggtaaggaaagcccttcamtcagggaagaacagaaggggagattttctttgatggttgtttggaagtcaggcttaaacaattgtgtctgtgtgtgcgcatgcacaaacacttttaccttatctttattttcttctttttatttgaatgtatagggttgtgtgtatttctgtgtaaatttggggttttcctcctcttagtctttcacttttgtggtg

SEQ ID NO: 583 - DNA, 396 bp, Homo sapiens
ttttctaacatctgcagtgcaattgaagttaccagtcatctgcagtctaaaaagaaagtgattttgggaggtgcgtagaaaaaatcatcttattatttttcctctatattacttttttctttttttctcctgaagaaacttttttttttggtgataccttctttttctctagcacgtataattttggaagcatttttcrtatgcagtgtatacttcagaaagagagagagagagaggaaaattgtcctgttcagcgtttgcatttccattattcctgctattagttaaaaacaacaacaacaacaaaaaacaagcaggatacctagatctggaaaagggagaattgtgtagagctgtcttcctaaagttctgagttagggctgcctcagaccactt

SEQ ID NO: 584 - DNA, 396 bp, Homo sapiens
ttttggaagcatttttcatatgcagtgtatacttcagaaagagagagagagagaggaaaattgtcctgttcagcgtttgcatttccattattcctgctattagttaaaaacaacaacaacaacaaaaaacaagcaggatacctagatctggaaaagggagaattgtgtagagctgtcttcctaaagttctgagttaggrctgcctcagaccactttcataactatctccagtggctttgtgttttatatttattaagatagagaaaaaaagagtaattactaagggcagctgctgtagctttatggtgattactgaacattgacatgctgtcacgtttttggaactttgagtatttaatcactttgggatattctattttcccccatcttgagtgt

SEQ ID NO: 585 - DNA, 396 bp, Homo sapiens
ggaactttgagtatttaatcactttgggatattctattttcccccatcttgagtgtggacagatgctggtgatgtagccttctgggcacagagcaagcctccccctcagcctctgcaccagaaaggctcagcttcacacactccaagtatgttttctacaagaactacactttgtggctttctgacccaaacatttttrtactaaattacacacaacaaagttgtagctcagagagggaacaaatggcttatttaggccaccattttcttgagccattatgatttcacacagggctcccttggccctgtaaattggcaaggattccattattcaacccgcatacatgtacagagaccctgctctggcccagatagtattctgggtacaggcggata

SEQ ID NO: 586 - DNA, 396 bp, Homo sapiens
tgtggacagatgctggtgatgtagccttctgggcacagagcaagcctccccctcagcctctgcaccagaaaggctcagcttcacacactccaagtatgttttctacaagaactacactttgtggctttctgacccaaacatttttatactaaattacacacaacaaagttgtagctcagagagggaacaaatggcttayttaggccaccattttcttgagccattatgatttcacacagggctcccttggccctgtaaattggcaaggattccattattcaacccgcatacatgtacagagaccctgctctggcccagatagtattctgggtacaggcggatagagcaggaaacaaaacagctacagtgatggacaggtcagcctgcagcaatgcc

SEQ ID NO: 587 - DNA, 396 bp, Homo sapiens
tttttatactaaattacacacaacaaagttgtagctcagagagggaacaaatggcttatttaggccaccattttcttgagccattatgatttcacacagggctcccttggccctgtaaattggcaaggattccattattcaacccgcatacatgtacagagaccctgctctggcccagatagtattctgggtacaggcrgatagagcaggaaacaaaacagctacagtgatggacaggtcagcctgcagcaatgcctgcagtctctgcaaaggtagctgtatgggtgggcaggtggctagcacttattcagctctggaaggatctcccctctggcctctcccctgacacccatcaataaaactgaggagcatcggtggacaggggaccttgtgccc

SEQ ID NO: 588 - DNA, 396 bp, Homo sapiens
ttttcttgagccattatgatttcacacagggctcccttggccctgtaaattggcaaggattccattattcaacccgcatacatgtacagagaccctgctctggcccagatagtattctgggtacaggcggatagagcaggaaacaaaacagctacagtgatggacaggtcagcctgcagcaatgcctgcagtctctgcraaggtagctgtatgggtgggcaggtggctagcacttattcagctctggaaggatctcccctctggcctctcccctgacacccatcaataaaactgaggagcatcggtggacaggggaccttgtgccccctccctgcctgtgcagttggggctgaacccagctacgaagtttgagctcactctctccagctccctctc

SEQ ID NO: 589 - DNA, 396 bp, Homo sapiens
gacaggtcagcctgcagcaatgcctgcagtctctgcaaaggtagctgtatgggtgggcaggtggctagcacttattcagctctggaaggatctcccctctggcctctcccctgacacccatcaataaaactgaggagcatcggtggacaggggaccttgtgccccctccctgcctgtgcagttggggctgaacccagcyacgaagtttgagctcactctctccagctccctctcaattcagagctgaactgtgggaagcttcagagctctctgtttcaaggacaggttctcctcacctctcctaatggaggtgcaccagggaactggccctgctctgcccagggctttctcctggactttgccatcatggtctagcaaaccctgttcagattgagg

SEQ ID NO: 590 - DNA, 396 bp, Homo sapiens
cactctctccagctccctctcaattcagagctgaactgtgggaagcttcagagctctctgtttcaaggacaggttctcctcacctctcctaatggaggtgcaccagggaactggccctgctctgcccagggctttctcctggactttgccatcatggtctagcaaaccctgttcagattgaggtgagtggtgagatttygaattctttttgacagataggattaagtcttcttctgtgggacaagtgggaggtagaggtaagattaaagatggccaaatgtctgagtcctgacagccacaatatggagatctagactttttacagaccacagggcacaggggcctcactaacagagttcccggaagtgatgagtgtgctgggggcttcctggttga

SEQ ID NO: 591 - DNA, 396 bp, Homo sapiens
taggattaagtcttcttctgtgggacaagtgggaggtagaggtaagattaaagatggccaaatgtctgagtcctgacagccacaatatggagatctagactttttacagaccacagggcacaggggcctcactaacagagttcccggaagtgatgagtgtgctgggggcttcctggttgaagagacactagaatggacsagctgggagctaattttttgggctggagtgtgatggcctgcacatcactgcctctgtccctccattgtcacagctgccccttaggagccagctgaggcaatttgtggtcagagtgactttgcacagttgtcctgcctgtgttcaggaagggagtttctgtggtccctttgaaaccacagaagagcccctcgtatagc

SEQ ID NO: 592 - DNA, 396 bp, Homo sapiens
agttgtcctgcctgtgttcaggaagggagtttctgtggtccctttgaaaccacagaagagcccctcgtatagctctcaatggagggggcaaaacattcaaataactcaggagataacacaactatttgtttttaactgtgagtttttaggcaatcacaaagatccagatgtatgtccaagcctctctttgcaattctawttaacctcaatgttgcaaccatagacctaccttacagagttcaaaaaaatatgcaaaaaccctgcctttcttcttcctcataccccaaaatgccattctgaacatttcctgttagttaaaaaaagatttccatggtgttaccaggcactgtacacagtctgtgtcccaagacaaggaggtacagttccacatgcgcc

SEQ ID NO: 593 - DNA, 396 bp, Homo sapiens
agggggcaaaacattcaaataactcaggagataacacaactatttgtttttaactgtgagtttttaggcaatcacaaagatccagatgtatgtccaagcctctctttgcaattctaattaacctcaatgttgcaaccatagacctaccttacagagttcaaaaaaatatgcaaaaaccctgcctttcttcttcctcatwccccaaaatgccattctgaacatttcctgttagttaaaaaaagatttccatggtgttaccaggcactgtacacagtctgtgtcccaagacaaggaggtacagttccacatgcgcccatgactgggttgggctctgcactctctctatactttgagagcctgattttctgtgattgggcagagctggcccacctggtg

SEQ ID NO: 594 - DNA, 396 bp, Homo sapiens
tctgcactctctctatactttgagagcctgattttctgtgattgggcagagctggcccacctggtgcaatgtcctcctctgcctttcaaacatgttttagtcatcaagatcttcaaatttgtaaccctttccagcttgatccagcagaatgcagatttggaaaaacagaacgagtttaaaatacatgattctaagaaayctggaccagaactatcaaaacttggtttcccagagaatatagcaaatgggctcattggccaatactatgacattggcttttgagaaaagaaaggctttattgcaaggctggccagcaaggagacaggagttgggctcaaatctgtctccccagtttggggcttagggcaagttttaattacacagacgcatttctta

SEQ ID NO: 595 - DNA, 396 bp, Homo sapiens
aaccctttccagcttgatccagcagaatgcagatttggaaaaacagaacgagtttaaaatacatgattctaagaaacctggaccagaactatcaaaacttggtttcccagagaatatagcaaatgggctcattggccaatactatgacattggcttttgagaaaagaaaggctttattgcaaggctggccagcaaggaracaggagttgggctcaaatctgtctccccagtttggggcttagggcaagttttaattacacagacgcatttcttatgagtagcaggcagagagcctccaacttcttctgcctaggtaccagcagcttagacatgatgcaaacctgggaagcacatactgtatttggagaaagtgattgggaagaaatgtgagctgag

SEQ ID NO: 596 - DNA, 396 bp, Homo sapiens
tacatgattctaagaaacctggaccagaactatcaaaacttggtttcccagagaatatagcaaatgggctcattggccaatactatgacattggcttttgagaaaagaaaggctttattgcaaggctggccagcaaggagacaggagttgggctcaaatctgtctccccagtttggggcttagggcaagttttaattayacagacgcatttcttatgagtagcaggcagagagcctccaacttcttctgcctaggtaccagcagcttagacatgatgcaaacctgggaagcacatactgtatttggagaaagtgattgggaagaaatgtgagctgaggggaggggctcagtgcccctgagctacacttagtgatggcagaggaaggatgtcctccc

SEQ ID NO: 597 - DNA, 396 bp, Homo sapiens
tggggcttagggcaagttttaattacacagacgcatttcttatgagtagcaggcagagagcctccaacttcttctgcctaggtaccagcagcttagacatgatgcaaacctgggaagcacatactgtatttggagaaagtgattgggaagaaatgtgagctgaggggaggggctcagtgcccctgagctacacttagtratggcagaggaaggatgtcctcccgcaggaggctgttccacatctgctctggttgtagggggagctggcaggcattagcagcggcctctttcccccaagagaggcagcctcctccaagttttggcgacattatggccctgcaatcataagggtttgtgagcatagtgctaaggagggaaatggagctgctgttacta

SEQ ID NO: 598 - DNA, 396 bp, Homo sapiens
cctcctgagtagctaggactacaagcatgtgccaccacgcccagctaatttttgtatttttagtaaggacagggtttcaccatgttggccaggttggcctccaactcctgacctcaagtcatcctcctgcctcgacctcccaaagtgctgggattacaggcatgaaaccagcctagaaatacatactattatttattcytgttttacagataagcaaagtgagtcatggagaatttggttgaaagtcccaaggtcaggagtcgtgaagctgggattaaaacctaatcatctgactttagagagtagacacttgctccatgcatattgcctccaattcattcattcaagcactccctgctcaagaagttctttcttatgttgagctgaaatctgcag

SEQ ID NO: 599 - DNA, 396 bp, Homo sapiens
tcatctgactttagagagtagacacttgctccatgcatattgcctccaattcattcattcaagcactccctgctcaagaagttctttcttatgttgagctgaaatctgcagccctatgcgttttacccagcagtcctggtgctgttccctaaaatcacttagactgtgcctgctctttctgtgtttacagtgtcagctrtaatatccccctcttcggcctaacgtttctgaagtcccttgccactgggtctcctctcctcttcctgtgttctttctaagaacacctatgcagataggtgtcttctgtacagggaagctgttcctgagatccgggcatcgactctgttagaataatctacgtatgagttatttttttgagaactatgtgtcattgct

SEQ ID NO: 600 - DNA, 396 bp, Homo sapiens
atgttgagctgaaatctgcagccctatgcgttttacccagcagtcctggtgctgttccctaaaatcacttagactgtgcctgctctttctgtgtttacagtgtcagctgtaatatccccctcttcggcctaacgtttctgaagtcccttgccactgggtctcctctcctcttcctgtgttctttctaagaacacctatrcagataggtgtcttctgtacagggaagctgttcctgagatccgggcatcgactctgttagaataatctacgtatgagttatttttttgagaactatgtgtcattgctgactcatattaactctgtggttaactaaaatctcaagatctctttatgtttgttgagaaacttatttaacttctctggccctccgtttcc

SEQ ID NO: 601 - DNA, 396 bp, Homo sapiens
gtcctggtgctgttccctaaaatcacttagactgtgcctgctctttctgtgtttacagtgtcagctgtaatatccccctcttcggcctaacgtttctgaagtcccttgccactgggtctcctctcctcttcctgtgttctttctaagaacacctatgcagataggtgtcttctgtacagggaagctgttcctgagatcygggcatcgactctgttagaataatctacgtatgagttatttttttgagaactatgtgtcattgctgactcatattaactctgtggttaactaaaatctcaagatctctttatgtttgttgagaaacttatttaacttctctggccctccgtttccttcactgagcagtggagtgattgataacctccacctgtggtt

SEQ ID NO: 602 - DNA, 396 bp, Homo sapiens
cacctatgcagataggtgtcttctgtacagggaagctgttcctgagatccgggcatcgactctgttagaataatctacgtatgagttatttttttgagaactatgtgtcattgctgactcatattaactctgtggttaactaaaatctcaagatctctttatgtttgttgagaaacttatttaacttctctggccctcmgtttccttcactgagcagtggagtgattgataacctccacctgtggttgctgaaggtcttgcacaagatgatatagttaaagtagctagcagtgcccacgtacggcggatgcctcacaacggtttgcagccatctctctatctgtgtctttgtctctctctcacactggttttggcttactgttagcagctagccga

SEQ ID NO: 603 - DNA, 396 bp, Homo sapiens
tctgtggttaactaaaatctcaagatctctttatgtttgttgagaaacttatttaacttctctggccctccgtttccttcactgagcagtggagtgattgataacctccacctgtggttgctgaaggtcttgcacaagatgatatagttaaagtagctagcagtgcccacgtacggcggatgcctcacaacggtttgcmgccatctctctatctgtgtctttgtctctctctcacactggttttggcttactgttagcagctagccgagataagtgtgtttatggtctttgcatgtattgtttctgtagcatactggaggattacaagaggttggggagtgagggggcggtgaggagtagacaaaggcagccaactcttccaagtttagcttagaa

SEQ ID NO: 604 - DNA, 396 bp, Homo sapiens
ttgataacctccacctgtggttgctgaaggtcttgcacaagatgatatagttaaagtagctagcagtgcccacgtacggcggatgcctcacaacggtttgcagccatctctctatctgtgtctttgtctctctctcacactggttttggcttactgttagcagctagccgagataagtgtgtttatggtctttgcatgyattgtttctgtagcatactggaggattacaagaggttggggagtgagggggcggtgaggagtagacaaaggcagccaactcttccaagtttagcttagaaggaaggagcggtaaaccctagttgaatgttggactgaagcaggtttgtttttgttttgtttaaaggatagggaagatctgtgcgtgtttccaggata

SEQ ID NO: 605 - DNA, 396 bp, Homo sapiens
acttgaagtcagtggcatggacagggtcaagatcacagttagaggatgcagccttagagaaaaggaaggggctcggttctctgagcaaggagggaaagaagagaggcagatgcagagaagtacggcacatcgtgctgctggttgtagaaataacctctgacttttaataaagtcatccctcggtatccctgggggattrgttctatgacctccctcggatgccaaaattcgtggatgctcaagtccctgatataaaatggcatagtatttgcatttaacctacacacatcctccatatcctttttttttttttttttttttttttttttttttttgtgagatggagtcttgctctgtcgccctggctggagtacagtggctcgatcttggctcact

SEQ ID NO: 606 - DNA, 396 bp, Homo sapiens
aatacctgatagaatgtaaatgctatgtaaacagttgttatactgtattgttaaaagacagtaacaagaaaaaaaatctgtacatgttcagtccagacaaatggttttctgttttttttttttttttttaatatttttggtcagtggttggttgactccaggaatgcagaacccgcagatatagaaggttgattatgcrttcagaggcagggaataccatcttgggttccagaaagaaaatgatcagcattttctgtcatactctggtaaaaacagatcttttgaatggacaggtgtattaaaccctgtggagctggctgggcctggcggctcacgcctgtaatcccagcactttgggaggctgaggcaggtggatcacgaggtcaggagttcgag

SEQ ID NO: 607 - DNA, 396 bp, Homo sapiens
tgccccgcagagtttgaagtcccggctgcacctctccccagcagcaggttgactctggaaagttgcagcgttcttacctacagagtgggaacagtactacccattgcacagagtgggtgcaaagctctgtgacggaatacatggcaagtgcccaccacattgcctgggatgaggtgggcccttcctttacgtaagagarccctacagatacactcaaagtgggcacattcctacagaaggagtgttatttgtgtagaaaagaaaaacatgaaaggcttttattcctatacacaataaagcacccctttaatgtctttttgaggaggataatatgaaattgatgaaaaggaaccctgtggttggatccctgacaatcacatgtatcccttttttcac

SEQ ID NO: 608 - DNA, 396 bp, Homo sapiens
  misc_feature (227)..(326): n = A,T,C or G
tacagatacactcaaagtgggcacattcctacagaaggagtgttatttgtgtagaaaagaaaaacatgaaaggcttttattcctatacacaataaagcacccctttaatgtctttttgaggaggataatatgaaattgatgaaaaggaaccctgtggttggatccctgacaatcacatgtatcccttttttcactcttraaaaaggagtaaaggaataaaatagaannnnnnnnnnnnnnnnnnnnnnnnnnnnnnnnnnnnnnnnnnnnnnnnnnnnnnnnnnnnnnnnnnnnnnnnnnnnnnnnnnnnnnnnnnnnnnnnnnnnatgtttcagtcactgtataataactagccagattttttgttgttgttgttttgtttttgtttttgttttt

SEQ ID NO: 609 - DNA, 396 bp, Homo sapiens
acattctgaaccacagacagttctttaccctgaacctttgcatattttgttctcttagcttagagcggcccctctccctccgtctgcttggctaatttctacttgttcttcagattttatcttagatgtcattccctcaaggaatccttctgtgactcaacatggaattaagttgcctcctttgaccctgaaagcaccrtgtactcaatctcatcttggcatgactcactttgctgtgtggaatgtctgctttccttgtttgtctattcctttagactgtaagatcctagaaagtgggggccgtgccttgctcatgactgtgtttctaacaccaaacacagtgttcagtagagagcagctgctgagtacgtttctgctaaatgacagttgatggag

SEQ ID NO: 610 - DNA, 396 bp, Homo sapiens
aatccttctgtgactcaacatggaattaagttgcctcctttgaccctgaaagcaccatgtactcaatctcatcttggcatgactcactttgctgtgtggaatgtctgctttccttgtttgtctattcctttagactgtaagatcctagaaagtgggggccgtgccttgctcatgactgtgtttctaacaccaaacacartgttcagtagagagcagctgctgagtacgtttctgctaaatgacagttgatggaggacatttagggttgcttggaggtcaagtcaaggaggcatttaacattctagtaaaacaaggaagtaacaggctcctgaacatgcccacaatgaaccagatgcaaaccttttcccttggcaggattctttgcccataaagtgg

SEQ ID NO: 611 - DNA, 396 bp, Homo sapiens
aaagcaccatgtactcaatctcatcttggcatgactcactttgctgtgtggaatgtctgctttccttgtttgtctattcctttagactgtaagatcctagaaagtgggggccgtgccttgctcatgactgtgtttctaacaccaaacacagtgttcagtagagagcagctgctgagtacgtttctgctaaatgacagtkgatggaggacatttagggttgcttggaggtcaagtcaaggaggcatttaacattctagtaaaacaaggaagtaacaggctcctgaacatgcccacaatgaaccagatgcaaaccttttcccttggcaggattctttgcccataaagtggagcacgaaagcaggacccagaatgggaggagcttccagaggaccggaa

SEQ ID NO: 612 - DNA, 396 bp, Homo sapiens
ttctgctaaatgacagttgatggaggacatttagggttgcttggaggtcaagtcaaggaggcatttaacattctagtaaaacaaggaagtaacaggctcctgaacatgcccacaatgaaccagatgcaaaccttttcccttggcaggattctttgcccataaagtggagcacgaaagcaggacccagaatgggaggagyttccagaggaccggaacacttgcctttgagcgggtctacactgccaagtgagtcctaaccctgatgttgctaataagtgggggcatgggcaggggggcctccttctaggagtgatgaccacccttaataccacatgtctgtctgagccaagtttctgagcgccagggaggtgaggaaggttggacttcaccagagag

SEQ ID NO: 613 - DNA, 396 bp, Homo sapiens
ggcatttaacattctagtaaaacaaggaagtaacaggctcctgaacatgcccacaatgaaccagatgcaaaccttttcccttggcaggattctttgcccataaagtggagcacgaaagcaggacccagaatgggaggagcttccagaggaccggaacacttgcctttgagcgggtctacactgccaagtgagtcctaamcctgatgttgctaataagtgggggcatgggcaggggggcctccttctaggagtgatgaccacccttaataccacatgtctgtctgagccaagtttctgagcgccagggaggtgaggaaggttggacttcaccagagaggctttgtggacaccctttatcatcttagtgagtgctagtgtcaaaacaaagggagtggg

SEQ ID NO: 614 - DNA, 396 bp, Homo sapiens
gctcctgaacatgcccacaatgaaccagatgcaaaccttttcccttggcaggattctttgcccataaagtggagcacgaaagcaggacccagaatgggaggagcttccagaggaccggaacacttgcctttgagcgggtctacactgccaagtgagtcctaaccctgatgttgctaataagtgggggcatgggcagggrggcctccttctaggagtgatgaccacccttaataccacatgtctgtctgagccaagtttctgagcgccagggaggtgaggaaggttggacttcaccagagaggctttgtggacaccctttatcatcttagtgagtgctagtgtcaaaacaaagggagtggggatatggggcacattggtggagggaggtgtgatctc

SEQ ID NO: 615 - DNA, 396 bp, Homo sapiens
ttgcccataaagtggagcacgaaagcaggacccagaatgggaggagcttccagaggaccggaacacttgcctttgagcgggtctacactgccaagtgagtcctaaccctgatgttgctaataagtgggggcatgggcaggggggcctccttctaggagtgatgaccacccttaataccacatgtctgtctgagccaagyttctgagcgccagggaggtgaggaaggttggacttcaccagagaggctttgtggacaccctttatcatcttagtgagtgctagtgtcaaaacaaagggagtggggatatggggcacattggtggagggaggtgtgatctctgcagcttcagaaagatctgaaagagtcatttggttagagaagttgacctatttcct

SEQ ID NO: 616 - DNA, 396 bp, Homo sapiens
aaacaaagggagtggggatatggggcacattggtggagggaggtgtgatctctgcagcttcagaaagatctgaaagagtcatttggttagagaagttgacctatttcctgtggggttagaccagggttgctactgtgaacaccagccatgactcaccagtcaccttcagaagccacaggcaggacatgctgacgacagycttcaactcacccaccccttgctcccctgcgggtggaagtctggaggtgacaccactgcattttctaacacgggggctccttgagcaactagaacaagaacagaaagaatggggacattagcaggtgctttccccctctctcattcttttctttgaataaaaaggttgtttgaaaacacctgagcggctcctaaaga

SEQ ID NO: 617 - DNA, 396 bp, Homo sapiens
ctcctctcttctttatgcagagtgtatttcaaggctcagccagtggcaggcatgctggggactatggactacggactaggggcctgtcacagaggaaggcctcatgctagagagctaagggaggagctggccttcagttccatcccaggagcaactttgatgttcccagagatccttccaaagggggagtcatggtcamccaagaaaaatgtattcagaatgccaagaatggtgcaaactcaggacaaagattcacactgcagggttggagtccctgggcttgctgctggcaccatgggagggagggtccccttcaggggtaccgttggtttcctgtgaattaaactggcttcaagggatctcgactgaacaggcctatatcacactcactgatat

SEQ ID NO: 618 - DNA, 396 bp, Homo sapiens
tctcctcatctaggtatttttaattgtttcagtgaggtgtaggcatgaggggattggagggggcatctcctccattgcagtttttcattggctgctttgctccctcagctccgaaatcgctgggccactctcgaacgcattagtacggtagtcacaggttgattgcctggccccttgccctctgtgggcattttccctytcagacagcccctgagtactcacagtgctgctacagtgggccacctagatctccctctttctccatgctcccacgtgctctgggctccactcccttctcccaagcacttctgtccagggctattccagcagtctgacctcaaggaaatcctttgctaaactgattatagagaggtttctattttaacatttaggtct

SEQ ID NO: 619 - DNA, 396 bp, Homo sapiens
atctaggtatttttaattgtttcagtgaggtgtaggcatgaggggattggagggggcatctcctccattgcagtttttcattggctgctttgctccctcagctccgaaatcgctgggccactctcgaacgcattagtacggtagtcacaggttgattgcctggccccttgccctctgtgggcattttccctttcagacwgcccctgagtactcacagtgctgctacagtgggccacctagatctccctctttctccatgctcccacgtgctctgggctccactcccttctcccaagcacttctgtccagggctattccagcagtctgacctcaaggaaatcctttgctaaactgattatagagaggtttctattttaacatttaggtcttccatgt

SEQ ID NO: 620 - DNA, 396 bp, Homo sapiens
aggtgtaggcatgaggggattggagggggcatctcctccattgcagtttttcattggctgctttgctccctcagctccgaaatcgctgggccactctcgaacgcattagtacggtagtcacaggttgattgcctggccccttgccctctgtgggcattttccctttcagacagcccctgagtactcacagtgctgctayagtgggccacctagatctccctctttctccatgctcccacgtgctctgggctccactcccttctcccaagcacttctgtccagggctattccagcagtctgacctcaaggaaatcctttgctaaactgattatagagaggtttctattttaacatttaggtcttccatgtattaattctcagaatcaatttaagatg

SEQ ID NO: 621 - DNA, 396 bp, Homo sapiens
cctttcagacagcccctgagtactcacagtgctgctacagtgggccacctagatctccctctttctccatgctcccacgtgctctgggctccactcccttctcccaagcacttctgtccagggctattccagcagtctgacctcaaggaaatcctttgctaaactgattatagagaggtttctattttaacatttaggycttccatgtattaattctcagaatcaatttaagatgtttaaaggtgtgatttaagacattttaaaaccatttggaggagagtacagaaattatgtcacttgctgtcagcctctttgcaccatctgcagagaaagatactagagtcccgccttggacacatccacatgcaagaggtgcaaagaaggtgtctttgatga

SEQ ID NO: 622 - DNA, 396 bp, Homo sapiens
ttctcagaatcaatttaagatgtttaaaggtgtgatttaagacattttaaaaccatttggaggagagtacagaaattatgtcacttgctgtcagcctctttgcaccatctgcagagaaagatactagagtcccgccttggacacatccacatgcaagaggtgcaaagaaggtgtctttgatgaggcaaggtcaaaactyctccccagacgaaatccaaagaaagcattcctactatgctatatcagtttggaaagaaaaacttctgccaggtgactgcattctcactggtcacattgtgttcctatggactcctcagctcaaccaatttggagaagttatggtgcaatttcaccatatctggttagaagttaagtttccaatttgctggcaatgaa

SEQ ID NO: 623 - DNA, 396 bp, Homo sapiens
aagaaggtgtctttgatgaggcaaggtcaaaacttctccccagacgaaatccaaagaaagcattcctactatgctatatcagtttggaaagaaaaacttctgccaggtgactgcattctcactggtcacattgtgttcctatggactcctcagctcaaccaatttggagaagttatggtgcaatttcaccatatctggytagaagttaagtttccaatttgctggcaatgaagaagaaatggagcaggccaggctgtgtagtttctgccacgtgcccccgggagtgaacagctctgtttgtaagaagccatggtgcttagacctgggctcgctagttgccagcctccaaattgcagaagtgccctttggttggtggctatgctgtgtcacttggga

SEQ ID NO: 624 - DNA, 396 bp, Homo sapiens
gcaacatatctgtgtgcctgtctgggttgtaaaaagggtcaaagatcaatgcagcaggcagctacatgctggcaaaagccagaggcagctggtctgtttgcctgtgccaggaaaccactgggaatggggttgtgtgttattctaggagaaagtcgtcccagcagcagcttctccaggggcatccaagagcactgaaaarggttgcaagatgacccatgaggctgcaggaagaaaagaacatgcatttaatcttgctatctgaaaagtaagacatgaagctttcctcatttttaatatacacatggacagtagtatgtgtatatagtttatatgcaaatatacttgttataaggttgcatgctcaaaatttttggttcatggggtgtgggatcataa

SEQ ID NO: 625 - DNA, 396 bp, Homo sapiens
cagctacatgctggcaaaagccagaggcagctggtctgtttgcctgtgccaggaaaccactgggaatggggttgtgtgttattctaggagaaagtcgtcccagcagcagcttctccaggggcatccaagagcactgaaaagggttgcaagatgacccatgaggctgcaggaagaaaagaacatgcatttaatcttgctrtctgaaaagtaagacatgaagctttcctcatttttaatatacacatggacagtagtatgtgtatatagtttatatgcaaatatacttgttataaggttgcatgctcaaaatttttggttcatggggtgtgggatcataaatgtttagggaccatggctatcaaggaaaaacagcatgaaggataaatgatactggtg

SEQ ID NO: 626 - DNA, 396 bp, Homo sapiens
ctatctgaaaagtaagacatgaagctttcctcatttttaatatacacatggacagtagtatgtgtatatagtttatatgcaaatatacttgttataaggttgcatgctcaaaatttttggttcatggggtgtgggatcataaatgtttagggaccatggctatcaaggaaaaacagcatgaaggataaatgatactggyggattaaaaagacagatgcatgtatttttagcataaaacacaactgctgactgatacagatagctcaagattctggggcagctgctgaacagatacactagccagtgtggctcatcggctcagacttggccttaattaatgggctgtccctccacccatctcccatgagggcagagctgagccagggtttgagagct

SEQ ID NO: 627 - DNA, 396 bp, Homo sapiens
agtttatatgcaaatatacttgttataaggttgcatgctcaaaatttttggttcatggggtgtgggatcataaatgtttagggaccatggctatcaaggaaaaacagcatgaaggataaatgatactggtggattaaaaagacagatgcatgtatttttagcataaaacacaactgctgactgatacagatagctcaasattctggggcagctgctgaacagatacactagccagtgtggctcatcggctcagacttggccttaattaatgggctgtccctccacccatctcccatgagggcagagctgagccagggtttgagagctaaaaggaattggacctggactctgttcacgtgtatattttaattctaattaattcattcttttgaaaga

SEQ ID NO: 628 - DNA, 394 bp, Homo sapiens
gtatttttagcataaaacacaactgctgactgatacagatagctcaagattctggggcagctgctgaacagatacactagccagtgtggctcatcggctcagacttggccttaattaatgggctgtccctccacccatctcccatgagggcagagctgagccagggtttgagagctaaaaggaattggacctggactcdgttcacgtgtatattttaattctaattaattcattcttttgaaagacagagtcacactctgttgcctaggctggagtgcagtggcacgatcttggctcactgcaacctcggcctcccaggttcaagttattctcctgcttcagcctcctgagtagctgggattataggcacatgcccccatgcctgactaatttt

SEQ ID NO: 629 - DNA, 396 bp, Homo sapiens
gctaaaaggaattggacctggactctgttcacgtgtatattttaattctaattaattcattcttttgaaagacagagtcacactctgttgcctaggctggagtgcagtggcacgatcttggctcactgcaacctcggcctcccaggttcaagttattctcctgcttcagcctcctgagtagctgggattataggcacaygcccccatgcctgactaatttttgtatttttagtagagacggggtttcaccatgtcaggctggtcttgaactcctgacctcaggttatccacccgccttggcccctcaaagtgttggaattacaggtgtgagccaccgtgcctggcctgttcacatgtataaaacacagtttaatgtcctattcccagccaatgagc

SEQ ID NO: 630 - DNA, 396 bp, Homo sapiens
tcaggttatccacccgccttggcccctcaaagtgttggaattacaggtgtgagccaccgtgcctggcctgttcacatgtataaaacacagtttaatgtcctattcccagccaatgagcatggctagagcagccttggtcaaagtttggtttttggagaaaaatccttgttagctgacctaagattcctctttgtgagtktaagtaagcacaggttgcagagaggagaagggtctctggagaggtgtaattttctaaatggattacaagttcatggacttttaacaggtgttacaggggataacaagttctttatagacagacttttgaggacgtttaagggtattctgattcttggttttctaagaggggaatgtattatttaactacagacaccc

SEQ ID NO: 631 - DNA, 396 bp, Homo sapiens
aaaatccagaataataataatttgtcaataggaaagacatttccactgggggttaagaaggaagacattggaacaatgatagccaccacttattgaatgcttactgtgagccaggtggcacttcaccttgtttcattctcacaacagtctagggaagtaattactaatgtctccatccacctcttgtagatgagcaaaytgaggctcattgaggctaggaaatgcacccacactcacatagcccataagaggcagccatggcattgggcccagaccatgtgaacttcaaagactacacgagcagccactgggcagctgtcatggctaaagccacttgaattcagcccagcagcaaccccctctccaggaggggcacataagcttgcagctttgggt

SEQ ID NO: 632 - DNA, 396 bp, Homo sapiens
ataataataatttgtcaataggaaagacatttccactgggggttaagaaggaagacattggaacaatgatagccaccacttattgaatgcttactgtgagccaggtggcacttcaccttgtttcattctcacaacagtctagggaagtaattactaatgtctccatccacctcttgtagatgagcaaactgaggctcaytgaggctaggaaatgcacccacactcacatagcccataagaggcagccatggcattgggcccagaccatgtgaacttcaaagactacacgagcagccactgggcagctgtcatggctaaagccacttgaattcagcccagcagcaaccccctctccaggaggggcacataagcttgcagctttgggtagaagctgca

SEQ ID NO: 633 - DNA, 396 bp, Homo sapiens
gcacttgaagtcctggatggcgagagggactggcttgagccagagccaggaacaaggctctgagaatattctggaaatccacaggaggaacccattttcttacagctgggagaatttcattcaactccaggctgaccatgttttattaggaacgaaggtgacttgaactaatagtcaggaatggttgaatacggacccratgtcaaatcactaggcagttcacatttctaatgagcaaatcccttagacaattaagaatttttttccttttgcataacccagacaaaatcgctacttaaaaacaaaccaaagacccgaaacatgagaaagagaaggaagcaggggaaatctttggtactaataagtttttaaacaataagagcaccagatatttta

SEQ ID NO: 634 - DNA, 396 bp, Homo sapiens
atgagcaaatcccttagacaattaagaatttttttccttttgcataacccagacaaaatcgctacttaaaaacaaaccaaagacccgaaacatgagaaagagaaggaagcaggggaaatctttggtactaataagtttttaaacaataagagcaccagatattttaccccatcagacacagaatgttattcgaataacsaaaaaaggaattttttctctaagtttcttgaactggaaaatgaatcatattttctcagtcctgaggctgcaattttgtgcctctagtaacatataagaatagatgtgatgccagtgcccagtagctgctgcaattgttacttggggacctgtttattcactaagcacttcaccccagtgataaatttgtaggggcct

SEQ ID NO: 635 - DNA, 396 bp, Homo sapiens
ccgtgtccattagatcagtggaaattctgggattcagagcactttgcaaggtcagcaggggtctgctctttctgtcctgttcctggtttttggttgtgcctggattccagggtaggtttctcatctgttaccttcatagacttctccagaaaaggatcttttgaccatcagaggaccacgaagattccattggtgaggygcagataacctgatctctctgggttctctgcagggcacagatgaagggctggccattcccaagttctcagtggtaccactgaggcatgagaccctaatggtttgcatgagcagtttgaaaattgcatctttgtttttacctatataatcacatgaaacccgtggttctcaaacgtcagcaggcatcagcatcacatg

SEQ ID NO: 636 - DNA, 396 bp, Homo sapiens
tcagtggtaccactgaggcatgagaccctaatggtttgcatgagcagtttgaaaattgcatctttgtttttacctatataatcacatgaaacccgtggttctcaaacgtcagcaggcatcagcatcacatggagggcttgttaaaacagatttctgggccccaacacagagttttaaattctgaaggcctgaggtgggygtgaacatttgcatttctaacatgttctcgatgctgctgccgcctctggtcccgagagcatgcctggagaactgccaccttcgaccatggactgtgagaattcacatggacctcagaattataatcagtctctcagttttacagataaggaaactaaatccagagagattgttttgccaatggtgaacagctggtta

SEQ ID NO: 637 - DNA, 396 bp, Homo sapiens
atggtttgcatgagcagtttgaaaattgcatctttgtttttacctatataatcacatgaaacccgtggttctcaaacgtcagcaggcatcagcatcacatggagggcttgttaaaacagatttctgggccccaacacagagttttaaattctgaaggcctgaggtgggtgtgaacatttgcatttctaacatgttctcratgctgctgccgcctctggtcccgagagcatgcctggagaactgccaccttcgaccatggactgtgagaattcacatggacctcagaattataatcagtctctcagttttacagataaggaaactaaatccagagagattgttttgccaatggtgaacagctggttaaagtcaggatggagactttaatcctagtca

SEQ ID NO: 638 - DNA, 396 bp, Homo sapiens
gagcagtttgaaaattgcatctttgtttttacctatataatcacatgaaacccgtggttctcaaacgtcagcaggcatcagcatcacatggagggcttgttaaaacagatttctgggccccaacacagagttttaaattctgaaggcctgaggtgggtgtgaacatttgcatttctaacatgttctcgatgctgctgcygcctctggtcccgagagcatgcctggagaactgccaccttcgaccatggactgtgagaattcacatggacctcagaattataatcagtctctcagttttacagataaggaaactaaatccagagagattgttttgccaatggtgaacagctggttaaagtcaggatggagactttaatcctagtcaagtgacctttc

SEQ ID NO: 639 - DNA, 396 bp, Homo sapiens
agtttgaaaattgcatctttgtttttacctatataatcacatgaaacccgtggttctcaaacgtcagcaggcatcagcatcacatggagggcttgttaaaacagatttctgggccccaacacagagttttaaattctgaaggcctgaggtgggtgtgaacatttgcatttctaacatgttctcgatgctgctgccgcckctggtcccgagagcatgcctggagaactgccaccttcgaccatggactgtgagaattcacatggacctcagaattataatcagtctctcagttttacagataaggaaactaaatccagagagattgttttgccaatggtgaacagctggttaaagtcaggatggagactttaatcctagtcaagtgacctttcctct

SEQ ID NO: 640 - DNA, 396 bp, Homo sapiens
catctttgtttttacctatataatcacatgaaacccgtggttctcaaacgtcagcaggcatcagcatcacatggagggcttgttaaaacagatttctgggccccaacacagagttttaaattctgaaggcctgaggtgggtgtgaacatttgcatttctaacatgttctcgatgctgctgccgcctctggtcccgagakcatgcctggagaactgccaccttcgaccatggactgtgagaattcacatggacctcagaattataatcagtctctcagttttacagataaggaaactaaatccagagagattgttttgccaatggtgaacagctggttaaagtcaggatggagactttaatcctagtcaagtgacctttcctctgtatttatttccc

SEQ ID NO: 641 - DNA, 396 bp, Homo sapiens
atttctgacatcctgaaccatagtaaaagggtgttttttgtttttttgagacagagtcttgctctgttgcctgggctggagtgcagtggtgtgatcttggctcgctgcaacctccgcctcccaggttcaagtgattctcctgcctcagcctcctgagtagctgggattacaggtgcttgccaccacacctggctatttkttgtgtttttagtagagacagggtttcaccatgttggccaggctggtcttgaactcctgaccttgtgatctgcctgcctcagcctcccaaattgctgggattacaaggcgtgttgttttaagccactcagtttgtggccacttgttacagcagcaagaggaaactcatacagttatcatgtgaactcacaggaatat

SEQ ID NO: 642 - DNA, 396 bp, Homo sapiens
gatctgcctgcctcagcctcccaaattgctgggattacaaggcgtgttgttttaagccactcagtttgtggccacttgttacagcagcaagaggaaactcatacagttatcatgtgaactcacaggaatatggtgagttaaaaagagaggaagggtgcaaaacatccacggtagagtgagaactctccagggagtgagractgtgcccagcatacagtgatcaccctcttagtaagctaagtttctgagcaccagcttttttgagttgactttgttgtctttaacatttgaagatcacccttctttgctcagcctggcttgcagacctgggctgatttgtggatctgatagaaaagtttccttagttgggctcttctccccgaccacccccatgcc

SEQ ID NO: 643 - DNA, 396 bp, Homo sapiens
tgcctcagcctcccaaattgctgggattacaaggcgtgttgttttaagccactcagtttgtggccacttgttacagcagcaagaggaaactcatacagttatcatgtgaactcacaggaatatggtgagttaaaaagagaggaagggtgcaaaacatccacggtagagtgagaactctccagggagtgaggactgtgcmcagcatacagtgatcaccctcttagtaagctaagtttctgagcaccagcttttttgagttgactttgttgtctttaacatttgaagatcacccttctttgctcagcctggcttgcagacctgggctgatttgtggatctgatagaaaagtttccttagttgggctcttctccccgaccacccccatgccagtgtggc

SEQ ID NO: 644 - DNA, 396 bp, Homo sapiens
gctactttgcagccaaggtaactcagacttccctttgttcattctccttctataaagtgcatctcaaggaggttcaaagggcaggctttttgttgaaaggactttgcctgacctctggctcccatctgtgaagccctggagaggtgagagccctcgggaggccgtgtttcaggcatgctctgcacccgtgcagagcgcrtgtgataatgcattgctaatgcttgctccctggtggctggctgagagctgctgtgctgacaagggtggtttaaggctaaatgtgactcagaatccttaagcagtgttagttcagatacaagggcattataaatgagagtgcctgagggatctattttgggaccgctgtcacttggctcttctgctaataagcttcca

SEQ ID NO: 645 - DNA, 396 bp, Homo sapiens
acagttatcagcagcccacaggcttgacttgagcaagttggaaagacaaatcaacttccagagttgatttaacattgagtggaaatcagtcatacttttggtcccctttcggggccacgcctggcactgtgcctggtggcagatcggcatgaactggccagcttctgtggccctggagggcacaggcagaaaggccacrctcagtcccatgatgaactgtttaagacttattgttgtctccccgctctgtaaagtagatagagtggattttatgtcccttattacctttcaggatactttgactcagggagataaagtaacttgggtacagctactcagctggtgaagaacacaggcagaatgagtgcctgggtcttttgacttaaaattctggat

SEQ ID NO: 646 - DNA, 396 bp, Homo sapiens
ctgtgcctggtggcagatcggcatgaactggccagcttctgtggccctggagggcacaggcagaaaggccacactcagtcccatgatgaactgtttaagacttattgttgtctccccgctctgtaaagtagatagagtggattttatgtcccttattacctttcaggatactttgactcagggagataaagtaacttgsgtacagctactcagctggtgaagaacacaggcagaatgagtgcctgggtcttttgacttaaaattctggatttttcacaaagatcctcttactttattcatttacataataaatatatattgaagagctactctgtgccaagccctgtgcctagatatacagtgataaataaagagtagcttctagaggtcacctgg

SEQ ID NO: 647 - DNA, 396 bp, Homo sapiens
aagttcagtgatagagagcagaggtgaggcggcagcagaaaccacttaagggacaccacgtggcactccttctgtgctgagaaggctgtcagtaagctcaccatttatttcctattttctctcctgagttaaataggaaacatgtctcgcattacttgaaaaatcaagtcaaactatgctcttactaggagttatggtyctttttatgtcttagatgatgcttgatctagatgaatgcggacttgctgtagctagataaatacaatgggagtttgaaggtgtttcgtagccctggaaataggtatttcctgtcaaaacaagctttgtcattgccagcagacaaaagcatcagtaaccttggttgataatcgtcatttcttaggaataaagtagact

SEQ ID NO: 648 - DNA, 396 bp, Homo sapiens
gtatttcctgtcaaaacaagctttgtcattgccagcagacaaaagcatcagtaaccttggttgataatcgtcatttcttaggaataaagtagactgtagaattttttttagcagaaaggaaacccaaagataattctagtgcaaatccctcactttatagagcagaagctcaagtcccagaggaacaagtggcttgaaygaacatcagaattttaggggctggatttgtaccctcctggtgccagcagcccacttccctgcaggaggcactcaccttccttgcacaggggtatgagtgtggccattttccacccataatctctgttagctcatgttcaattgggttcccattgaaagaaaaatggaccagtaagttggagcagaatcattcagatg

SEQ ID NO: 649 - DNA, 396 bp, Homo sapiens
agctttgtcattgccagcagacaaaagcatcagtaaccttggttgataatcgtcatttcttaggaataaagtagactgtagaattttttttagcagaaaggaaacccaaagataattctagtgcaaatccctcactttatagagcagaagctcaagtcccagaggaacaagtggcttgaacgaacatcagaattttagkggctggatttgtaccctcctggtgccagcagcccacttccctgcaggaggcactcaccttccttgcacaggggtatgagtgtggccattttccacccataatctctgttagctcatgttcaattgggttcccattgaaagaaaaatggaccagtaagttggagcagaatcattcagatggtataacataaggaaaaa

SEQ ID NO: 650 - DNA, 396 bp, Homo sapiens
tgtttaaattgcttttatatctgtagctctagataacactagttccagcttagttaactcccagctccaagccttcaggacttcatagagttattggggtgctgctcttggcagtttcccaaaaagctagaatgcagagggaatctccttcccaaaaagctagaatgcagagggaatctccttcccaaaaggctagaaygcagagggaatctccttcccaaaaagctagaatgcagagggaatctccttcccaaaaggctagaacgcagagggaatctccttcccaaaaggctagaacgcagagggaatctccttcccaaaaggctagaatgcagagggaatgtccttctcttctaaatggtagctgttagttcaagaaaggttaaacattgtgct

SEQ ID NO: 651 - DNA, 396 bp, Homo sapiens
gctgcgtttgctggactgatgtacttgtttgtgaggcaaaagtactttgtcggttacctaggagagagaacgcagaggtaggtaactgggactactaaagaactgtggagcgattcctgatttttgagcaggaagagtgacaattcaaaacagtatttgactagattcacggctccgtagcatccccttgggtgggagsgggaaggctgactaggacctctgattcttctttccctgagctttgaaggctctgaaaatacagctggggggacttgcccagttttcttattaagcaattcctccgcatggtgctggctttcaaagggtgcttcagtgctgtttgctgcacgtgccttgcagccccacaccctgcactcccgccctgcagagtctggc

SEQ ID NO: 652 - DNA, 396 bp, Homo sapiens
gaggcaaaagtactttgtcggttacctaggagagagaacgcagaggtaggtaactgggactactaaagaactgtggagcgattcctgatttttgagcaggaagagtgacaattcaaaacagtatttgactagattcacggctccgtagcatccccttgggtgggagggggaaggctgactaggacctctgattcttctytccctgagctttgaaggctctgaaaatacagctggggggacttgcccagttttcttattaagcaattcctccgcatggtgctggctttcaaagggtgcttcagtgctgtttgctgcacgtgccttgcagccccacaccctgcactcccgccctgcagagtctggcgctggaatgacattttaggtctgggttcccag

SEQ ID NO: 653 - DNA, 396 bp, Homo sapiens
tatctttcagggaccagaagaaagaatgttgggaaaataagatgcagtaagatgcagacatgacagcagggtgcagcggctcacgcctataatcccagcactttgggaggctgaggtgggtggatcacctgaggtcaggagtttgagaccagcctggccaacatggtgaaaccccgtctctactaaaaaatatacaaarcattagccaggcatggtggtgggcgcctgtaatcccagctactccataggctgaggctggagaatcgcttgaacccaggaggcagaggttgcagtgagccgagattgcgccactgcactccagcctgggcaacaaaagcaaaactccatctcaaaaaaaaaaaaaaaaaaaaaaaaaaagatgcagacacgagactg

SEQ ID NO: 654 - DNA, 396 bp, Homo sapiens
tgggcgcctgtaatcccagctactccataggctgaggctggagaatcgcttgaacccaggaggcagaggttgcagtgagccgagattgcgccactgcactccagcctgggcaacaaaagcaaaactccatctcaaaaaaaaaaaaaaaaaaaaaaaaaaagatgcagacacgagactgtgaaactgactagcatcaccwttgcattgtttatagatgttgccagacagaaagccccaaagcagcacagtaccttcctgacatctggactaggaaatctagattttagtaaaatacatgctaatacttacagaagaaatgtcggcgttagagtatgccgtcagttccttagagattgcaattcctaatgcactagtatggtttcaggtgccaggaac

SEQ ID NO: 655 - DNA, 396 bp, Homo sapiens
actccatctcaaaaaaaaaaaaaaaaaaaaaaaaaaagatgcagacacgagactgtgaaactgactagcatcaccattgcattgtttatagatgttgccagacagaaagccccaaagcagcacagtaccttcctgacatctggactaggaaatctagattttagtaaaatacatgctaatacttacagaagaaatgtcrgcgttagagtatgccgtcagttccttagagattgcaattcctaatgcactagtatggtttcaggtgccaggaacacgttctgtgaggctgctgccccaggtgctgaccccagccttccacaccattttccttccttgtgttcacagccgctctgtcttttacaatagcacccctctctagtggctaatgggctctat

SEQ ID NO: 656 - DNA, 396 bp, Homo sapiens
aaaaaaaaaaaaaaaaaaaaaagatgcagacacgagactgtgaaactgactagcatcaccattgcattgtttatagatgttgccagacagaaagccccaaagcagcacagtaccttcctgacatctggactaggaaatctagattttagtaaaatacatgctaatacttacagaagaaatgtcggcgttagagtatgcygtcagttccttagagattgcaattcctaatgcactagtatggtttcaggtgccaggaacacgttctgtgaggctgctgccccaggtgctgaccccagccttccacaccattttccttccttgtgttcacagccgctctgtcttttacaatagcacccctctctagtggctaatgggctctatgattagatagcatcc

SEQ ID NO: 657 - DNA, 396 bp, Homo sapiens
tttcaggtgccaggaacacgttctgtgaggctgctgccccaggtgctgaccccagccttccacaccattttccttccttgtgttcacagccgctctgtcttttacaatagcacccctctctagtggctaatgggctctatgattagatagcatccttcagtagtgataaaggcagtgacatcctagggaggtcagcggktgaaagcgctatatctggaaaacctgagagcctgtgaagctcaaggacttgacggggttagaccgtgagccgggctgcagctggaaaaagaatgactgttctttcagcagatccttccctgtgccatctctttcttcattcctctctagtggcattcttatttatcctctaaaaccacaattccattatctctccta

SEQ ID NO: 658 - DNA, 396 bp, Homo sapiens
gagggtcttctcttttgcctggctccctatgcagccctatcttaccccctgcaaagtcccagggatgtggctcagtcactgctcctctcttcatctgtcaccacttgcttgagatcctacagctgctttaattccgagaccatctgcagaacatgacaaaatttgtccacctacccacatgtccttttaactttaaagrctttactaactgattcctattagggaatgaacagaggtggcaaaaataaacaataggagattgatttacaagaaatctttaaaatagtagatttcttcggacctcattgaaatataaatggcctgccttcttgtgtccctccctggtctccctctttaggtgataagaagaagatcctgccagccccataacccgcc

SEQ ID NO: 659 - DNA, 396 bp, Homo sapiens
ttaaaatagtagatttcttcggacctcattgaaatataaatggcctgccttcttgtgtccctccctggtctccctctttaggtgataagaagaagatcctgccagccccataacccgccatctgcgcgggttctagacccccttctcctcccctctggccgtggtaggcattactgatgaatcatggtgctctttcttmcagagaccaaacctggcctcggaatccttcttaacacagatactgcttaacacaaccactctgagcagctgtcataagtagaagtaatagatactagaagaaatgtctaagcctaatctagaccaaaatacggcctgatatagatgcaagccagaggggctttatggttaaatgcaaggagattttcaaccctgccg

SEQ ID NO: 660 - DNA, 396 bp, Homo sapiens
ctggtctccctctttaggtgataagaagaagatcctgccagccccataacccgccatctgcgcgggttctagacccccttctcctcccctctggccgtggtaggcattactgatgaatcatggtgctctttcttccagagaccaaacctggcctcggaatccttcttaacacagatactgcttaacacaaccactctgrgcagctgtcataagtagaagtaatagatactagaagaaatgtctaagcctaatctagaccaaaatacggcctgatatagatgcaagccagaggggctttatggttaaatgcaaggagattttcaaccctgccgtctagaagctacttgctgagatcttcttcagttgggcccatctcctccccaggcctctcttctg

SEQ ID NO: 661 - DNA, 396 bp, Homo sapiens
ccataacccgccatctgcgcgggttctagacccccttctcctcccctctggccgtggtaggcattactgatgaatcatggtgctctttcttccagagaccaaacctggcctcggaatccttcttaacacagatactgcttaacacaaccactctgagcagctgtcataagtagaagtaatagatactagaagaaatgtmtaagcctaatctagaccaaaatacggcctgatatagatgcaagccagaggggctttatggttaaatgcaaggagattttcaaccctgccgtctagaagctacttgctgagatcttcttcagttgggcccatctcctccccaggcctctcttctgttcctgggctatgtcacacttggactctgcagacacctaatgc

SEQ ID NO: 662 - DNA, 396 bp, Homo sapiens
tggtaggcattactgatgaatcatggtgctctttcttccagagaccaaacctggcctcggaatccttcttaacacagatactgcttaacacaaccactctgagcagctgtcataagtagaagtaatagatactagaagaaatgtctaagcctaatctagaccaaaatacggcctgatatagatgcaagccagaggggckttatggttaaatgcaaggagattttcaaccctgccgtctagaagctacttgctgagatcttcttcagttgggcccatctcctccccaggcctctcttctgttcctgggctatgtcacacttggactctgcagacacctaatgctcttgggacctgctttagttcttgacctcaccaaccgaggaggaattgctagat

SEQ ID NO: 663 - DNA, 396 bp, Homo sapiens
cagagaccaaacctggcctcggaatccttcttaacacagatactgcttaacacaaccactctgagcagctgtcataagtagaagtaatagatactagaagaaatgtctaagcctaatctagaccaaaatacggcctgatatagatgcaagccagaggggctttatggttaaatgcaaggagattttcaaccctgccgtytagaagctacttgctgagatcttcttcagttgggcccatctcctccccaggcctctcttctgttcctgggctatgtcacacttggactctgcagacacctaatgctcttgggacctgctttagttcttgacctcaccaaccgaggaggaattgctagatgagatccttcccccggaatttctctcttgaaccccaga

SEQ ID NO: 664 - DNA, 396 bp, Homo sapiens
gggctttatggttaaatgcaaggagattttcaaccctgccgtctagaagctacttgctgagatcttcttcagttgggcccatctcctccccaggcctctcttctgttcctgggctatgtcacacttggactctgcagacacctaatgctcttgggacctgctttagttcttgacctcaccaaccgaggaggaattgctmgatgagatccttcccccggaatttctctcttgaaccccagatggtccgttgcccctttccagaagttgctccagccctgtccgcttaggaagttcagtgtcatccttgatccagtgggtagggaagacattccataatgaatgccccagtctgagcttcttccttcaggcttcaggctgccctgcgaggattttgca

SEQ ID NO: 665 - DNA, 396 bp, Homo sapiens
gtagctgagactacaggtgtgcactaccacacccagctaattttttgtatttttagtagagatagggtttagctatgttggccaggctggtctcgaactgctgaactcaagcaatctgccatccccggcctcccaaagtactgggagtataggcataagccacccatgatgcccagcctgaatcttggtttcttccccrttcatttaagctattacctgggcctgaactcaatggcacctggcaccaactggcaactgactcttggtcttttattacctaccttccctagcaggcactgggttgctccctcttcctatcccatggagtcctgtcctctgttggggctcctactgatcctcttggcaatatgaagttctcagctcaatggtgggtgg

SEQ ID NO: 666 - DNA, 396 bp, Homo sapiens
cccggcctcccaaagtactgggagtataggcataagccacccatgatgcccagcctgaatcttggtttcttccccattcatttaagctattacctgggcctgaactcaatggcacctggcaccaactggcaactgactcttggtcttttattacctaccttccctagcaggcactgggttgctccctcttcctatcccrtggagtcctgtcctctgttggggctcctactgatcctcttggcaatatgaagttctcagctcaatggtgggtgggcaatgactgccaactcttgaggccaatgaactcaggttaccccactcctcctcctcctgagttgctcactcactcctcattcactcaacattgattcagtagatatttgctacctgctctgt

SEQ ID NO: 667 - DNA, 396 bp, Homo sapiens
ccggcctcccaaagtactgggagtataggcataagccacccatgatgcccagcctgaatcttggtttcttccccattcatttaagctattacctgggcctgaactcaatggcacctggcaccaactggcaactgactcttggtcttttattacctaccttccctagcaggcactgggttgctccctcttcctatcccayggagtcctgtcctctgttggggctcctactgatcctcttggcaatatgaagttctcagctcaatggtgggtgggcaatgactgccaactcttgaggccaatgaactcaggttaccccactcctcctcctcctgagttgctcactcactcctcattcactcaacattgattcagtagatatttgctacctgctctgtg

SEQ ID NO: 668 - DNA, 396 bp, Homo sapiens
ggcataagccacccatgatgcccagcctgaatcttggtttcttccccattcatttaagctattacctgggcctgaactcaatggcacctggcaccaactggcaactgactcttggtcttttattacctaccttccctagcaggcactgggttgctccctcttcctatcccatggagtcctgtcctctgttggggctccyactgatcctcttggcaatatgaagttctcagctcaatggtgggtgggcaatgactgccaactcttgaggccaatgaactcaggttaccccactcctcctcctcctgagttgctcactcactcctcattcactcaacattgattcagtagatatttgctacctgctctgtgccaggtaccaggtcagttgctgaagga

SEQ ID NO: 669 - DNA, 396 bp, Homo sapiens
cctggcaccaactggcaactgactcttggtcttttattacctaccttccctagcaggcactgggttgctccctcttcctatcccatggagtcctgtcctctgttggggctcctactgatcctcttggcaatatgaagttctcagctcaatggtgggtgggcaatgactgccaactcttgaggccaatgaactcaggttwccccactcctcctcctcctgagttgctcactcactcctcattcactcaacattgattcagtagatatttgctacctgctctgtgccaggtaccaggtcagttgctgaaggagtaacagtgaacatgacggagtctttgtccccaaggagacccaaggtgtctcctagagccaggggcacattgcaagaccaaatata

SEQ ID NO: 670 - DNA, 396 bp, Homo sapiens
ctggcaactgactcttggtcttttattacctaccttccctagcaggcactgggttgctccctcttcctatcccatggagtcctgtcctctgttggggctcctactgatcctcttggcaatatgaagttctcagctcaatggtgggtgggcaatgactgccaactcttgaggccaatgaactcaggttaccccactcctyctcctcctgagttgctcactcactcctcattcactcaacattgattcagtagatatttgctacctgctctgtgccaggtaccaggtcagttgctgaaggagtaacagtgaacatgacggagtctttgtccccaaggagacccaaggtgtctcctagagccaggggcacattgcaagaccaaatatattcaacttacc

SEQ ID NO: 671 - DNA, 396 bp, Homo sapiens
ccatggagtcctgtcctctgttggggctcctactgatcctcttggcaatatgaagttctcagctcaatggtgggtgggcaatgactgccaactcttgaggccaatgaactcaggttaccccactcctcctcctcctgagttgctcactcactcctcattcactcaacattgattcagtagatatttgctacctgctctrtgccaggtaccaggtcagttgctgaaggagtaacagtgaacatgacggagtctttgtccccaaggagacccaaggtgtctcctagagccaggggcacattgcaagaccaaatatattcaacttaccaaaataatcatagacctagttctcaaaaagcaagaagactgattcctcgttgtcatttctcctcctcagca

SEQ ID NO: 672 - DNA, 396 bp, Homo sapiens
ttagagtctgtgggcccctccaagtgtggagtatggtgttacttcaccagagtttgaggagaaacattcttcttttggaaggccggggagcatagatggatatcaaggctgctgtttctaaaagcgaaacccaccaaacaacagtattagaatcatctgtggtgcttattaaagatacagattcctgggccccatcccmgacttatgaatcagaatctctgccagaggaagcctgagaatttgcattctcagatgattctgcattctcagataacacattctttaggtgattcttacacacactggagtttgggaatcgctgaaggctgttcacttctcttttctgagaaatgattcattcatttcagaaatatttgcagaggtccttatttattg

SEQ ID NO: 673 - DNA, 396 bp, Homo sapiens
tggcctcattcgtgtgataaatctgagccaccacgatatttgacttttcacaatttaatttatctgaaccctctattctctggctaaaaaatatcccttacttggacttctttattttattttcaattcccttaccagcactagcaggggactctgtactcatctgctggcgctgccataacaaagcactgcagcctgkggggctcaaaccacagaatttattctctcacagtcctagaggctagaagtccaagatcaaagtgtgggcagggtcggtttctcctgcagcctctctccttggcttatagagtgccaccttctacctgtgtcttcacatcatcacctcactgagcatgtctgtgtccaaatctccccttcttataagaccccagtcat

SEQ ID NO: 674 - DNA, 396 bp, Homo sapiens
tctccttggcttatagagtgccaccttctacctgtgtcttcacatcatcacctcactgagcatgtctgtgtccaaatctccccttcttataagaccccagtcatactggatgaggatccacccatatgagttcattttaccttaattatctctttaaacaccctgtctccaaatacagtcccattctgaggaactgagrgtaaagattcaacatatgaattttggaagggacctaattcagcccacaacaccctcttttgggatgtttattttcccccttaaggagctagttaggatgtcttatctcatgaacatgactgtgaacaggaaaacagggagagaatgaagctggccaaggaacagggctggtgtcagctagcagtgcttttctgatgt

SEQ ID NO: 675 - DNA, 396 bp, Homo sapiens
cattttaccttaattatctctttaaacaccctgtctccaaatacagtcccattctgaggaactgagagtaaagattcaacatatgaattttggaagggacctaattcagcccacaacaccctcttttgggatgtttattttcccccttaaggagctagttaggatgtcttatctcatgaacatgactgtgaacaggaaracagggagagaatgaagctggccaaggaacagggctggtgtcagctagcagtgcttttctgatgtgagtgggtcccacagggagcttgttaaaatgcagattctgattcattaggttccagagggacctgagatttcccatttctgacaagtttccagtgtgggggctgatgctgctggtccacggaccatactttg

SEQ ID NO: 676 - DNA, 396 bp, Homo sapiens
gggagagaatgaagctggccaaggaacagggctggtgtcagctagcagtgcttttctgatgtgagtgggtcccacagggagcttgttaaaatgcagattctgattcattaggttccagagggacctgagatttcccatttctgacaagtttccagtgtgggggctgatgctgctggtccacggaccatactttgagtakcaaggagcttgatacataatggctgagtgactttcagactcctgctgtagaaaaattatgagttggctgggcgtggtggctcacgcctgtaatcccagcactttgggaggccgaggtgggcagatcacctgaggtcaggagttcgagaccagcctggccaacatggtgaaacaccatctctaccaaaaatacaaaaa

SEQ ID NO: 677 - DNA, 396 bp, Homo sapiens
acttaagcccagaagactgaggttgcagtgagccgagattgcaccactgcactccagcttgggctacagagtgagactctatctcaaaaacaaagaaacaaacaacaacaataacaacaaaaaccaagtctctccctccactcaaaaatgcaagggcctgtctcccattgctgggtgcccaggtctcatgaatgtagayatgaattattccagtcagcctcaggagaatagaatgagccctcagatgccgaagcacctttcagattccaccggttttatcggctcatttaaacttcacttctaacacagtcctgcattacacacgtgtctgtcgttatgggcagctgcagagagggtcttaatggtcctaatgctcagtgaggatgcccaatggtc

SEQ ID NO: 678 - DNA, 396 bp, Homo sapiens
ctcaaaaacaaagaaacaaacaacaacaataacaacaaaaaccaagtctctccctccactcaaaaatgcaagggcctgtctcccattgctgggtgcccaggtctcatgaatgtagatatgaattattccagtcagcctcaggagaatagaatgagccctcagatgccgaagcacctttcagattccaccggttttatcrgctcatttaaacttcacttctaacacagtcctgcattacacacgtgtctgtcgttatgggcagctgcagagagggtcttaatggtcctaatgctcagtgaggatgcccaatggtcaacagaacctgccatcttcaggccatcaaggagctctggagttaaggaaatcatgagagcacagaggggcgggtacagcaga

SEQ ID NO: 679 - DNA, 396 bp, Homo sapiens
tgtagatatgaattattccagtcagcctcaggagaatagaatgagccctcagatgccgaagcacctttcagattccaccggttttatcggctcatttaaacttcacttctaacacagtcctgcattacacacgtgtctgtcgttatgggcagctgcagagagggtcttaatggtcctaatgctcagtgaggatgcccartggtcaacagaacctgccatcttcaggccatcaaggagctctggagttaaggaaatcatgagagcacagaggggcgggtacagcagagccctcgtggtaatgggttttgaggtctaggctctcttcacttgggtttgaaataagttcaatgactagtaatagctgagacacttctacccttcaaatgaagtaaatgg

SEQ ID NO: 680 - DNA, 396 bp, Homo sapiens
agcacctttcagattccaccggttttatcggctcatttaaacttcacttctaacacagtcctgcattacacacgtgtctgtcgttatgggcagctgcagagagggtcttaatggtcctaatgctcagtgaggatgcccaatggtcaacagaacctgccatcttcaggccatcaaggagctctggagttaaggaaatcawgagagcacagaggggcgggtacagcagagccctcgtggtaatgggttttgaggtctaggctctcttcacttgggtttgaaataagttcaatgactagtaatagctgagacacttctacccttcaaatgaagtaaatgggaaaatggagcattgttgagtccagggagctataatttaaaccccatatatctaaaagg

SEQ ID NO: 681 - DNA, 396 bp, Homo sapiens
cacacgtgtctgtcgttatgggcagctgcagagagggtcttaatggtcctaatgctcagtgaggatgcccaatggtcaacagaacctgccatcttcaggccatcaaggagctctggagttaaggaaatcatgagagcacagaggggcgggtacagcagagccctcgtggtaatgggttttgaggtctaggctctcttcrcttgggtttgaaataagttcaatgactagtaatagctgagacacttctacccttcaaatgaagtaaatgggaaaatggagcattgttgagtccagggagctataatttaaaccccatatatctaaaaggggtaacatttttgtgtgtgtgaaattggtgtcattcgcactgcatctacagttttctttttccttctc

SEQ ID NO: 682 - DNA, 396 bp, Homo sapiens
acatatttgggaaacgcatcatactcttcctgttcctcatgtccgttgctggcatattcaactattacctcatcttctttttcggaagtgactttgaaaactacataaagacgatctccaccaccatctcccctctacttctcattccctaactctctgctgaatatggggttggtgttctcatctaatcaatacctayaagtcatcataattcagctcttgagagcattctgctcttctttagatggctgtaaatctattggccatctgggcttcacagcttgagttaaccttgcttttccgggaacaaaatgatgtcatgtcagctccgccccttgaacatgaccgtggccccaaatttgctattcccatgcattttgtttgtttcttcactta

SEQ ID NO: 683 - DNA, 396 bp, Homo sapiens
tggtgttctcatctaatcaatacctacaagtcatcataattcagctcttgagagcattctgctcttctttagatggctgtaaatctattggccatctgggcttcacagcttgagttaaccttgcttttccgggaacaaaatgatgtcatgtcagctccgccccttgaacatgaccgtggccccaaatttgctattcccrtgcattttgtttgtttcttcacttatcctgttctctgaagatgttttgtgaccaggtttgtgttttcttaaaataaaatgcagagacatgttttaagctgatagttgaggggttttgttaatggcttttgggggatttatctctatacccacaaacgactagtttgttttcctcaaactaaatgataatattaaaaa

SEQ ID NO: 684 - DNA, 396 bp, Homo sapiens
ttatctctatacccacaaacgactagtttgttttcctcaaactaaatgataatattaaaaatacacatcctggccaggtgtggtggctcatacctgtaatcccagcactttgggaggccgaggcaggtggatcacttgaggtcaggaattaagaccagcctggccaatatggtgaaagcctgtctgtactaaaaatacraaaattagccaggtatgctggtggatgcttataatcccagctacttgggaggttgaggcaggagaattgcttgaacccgggaggtagaggttgcagtgagccaagatcatgccactgcactccagcttgggcaacagagtgagactccatctcaaattaaaaaaaatacacatctggcttctggaaaaattacttga

SEQ ID NO: 685 - DNA, 396 bp, Homo sapiens
gatcatgccactgcactccagcttgggcaacagagtgagactccatctcaaattaaaaaaaatacacatctggcttctggaaaaattacttgaagatcttttatgacatccatccctcttcacacagccatgtgaattaggttggtatcttcatatactagcatcgtgcccagcacttccatgttatacagtttaaaakgttctgtaattccctgtgggaacctaagataatgcgaggaccgtcatacgtgcccccaaatattggcaaaccaatgaataaatgaatgaatgagtttatgaatcgctaactggctgtatttaatgaagtatgtgtgttgagccatttcccacagtgtggacagatttgtcccacaatatgggcctcttcccaaaggc

SEQ ID NO: 686 - DNA, 396 bp, Homo sapiens
aattaaaaaaaatacacatctggcttctggaaaaattacttgaagatcttttatgacatccatccctcttcacacagccatgtgaattaggttggtatcttcatatactagcatcgtgcccagcacttccatgttatacagtttaaaatgttctgtaattccctgtgggaacctaagataatgcgaggaccgtcatacrtgcccccaaatattggcaaaccaatgaataaatgaatgaatgagtttatgaatcgctaactggctgtatttaatgaagtatgtgtgttgagccatttcccacagtgtggacagatttgtcccacaatatgggcctcttcccaaaggccctaccacctaatgccatcacactggggatttgatttcaacatgtgaatt

SEQ ID NO: 687 - DNA, 396 bp, Homo sapiens
agttcatagtgacagtgatccagccactgtcatgacaggtgccacttggcagaaacagcacagcttggaagatggcggggtgtagtcaagattccaggatccccaacagagaagccagctcttataggggagccattcatcaggattgaactctcaatcgagctggacagtaataggtgggtctgtgttattccccagrtgagtatcatgacagtcacaatcctaggaaggatgtgaagcctcccccagctctcctccagttgcctgcttgggcagcagagatgatggaatgtggagtctggcgtggtctgaggcctgaatccatgtgcctcatgtatgatgctcaggcaagaggatctctcaattcaagggagagggcctgaatgagccttgctt

SEQ ID NO: 688 - DNA, 396 bp, Homo sapiens
cttggcagaaacagcacagcttggaagatggcggggtgtagtcaagattccaggatccccaacagagaagccagctcttataggggagccattcatcaggattgaactctcaatcgagctggacagtaataggtgggtctgtgttattccccagatgagtatcatgacagtcacaatcctaggaaggatgtgaagcctyccccagctctcctccagttgcctgcttgggcagcagagatgatggaatgtggagtctggcgtggtctgaggcctgaatccatgtgcctcatgtatgatgctcaggcaagaggatctctcaattcaagggagagggcctgaatgagccttgctttccaggcctgtctgatggtccaggctgaagcccctcctggcttg

SEQ ID NO: 689 - DNA, 396 bp, Homo sapiens
ctggcgtggtctgaggcctgaatccatgtgcctcatgtatgatgctcaggcaagaggatctctcaattcaagggagagggcctgaatgagccttgctttccaggcctgtctgatggtccaggctgaagcccctcctggcttgcactgccagacctcatccagcaggagctccttggcattgactgcttcaggatagttscttctgctctgagtgctctctaaagagcagtgctctaccatccaagctgggcttttcttttcttcttgctgatagggaaggcatgggacattgcaggatggaagtggcccccaggccttctcatgcctgggcttggtttggaaggtggtcaggtgatcaataatcctgattggcctggcattgaggagttttcctgg

SEQ ID NO: 690 - DNA, 396 bp, Homo sapiens
tgctctctaaagagcagtgctctaccatccaagctgggcttttcttttcttcttgctgatagggaaggcatgggacattgcaggatggaagtggcccccaggccttctcatgcctgggcttggtttggaaggtggtcaggtgatcaataatcctgattggcctggcattgaggagttttcctgggatgtggtcctttcrgttttttaaaaattatttttattgatacacatatttgtaggtatttgtggggtgcatgtgatactttattatgtgtgtggattgtgtaatgatgaagtcagggcatttagggtcttcatcaccttgattatcatttctatgtgttgagaacatttcaagttctcagttccagctattttgaaatagacagtccattt

SEQ ID NO: 691 - DNA, 396 bp, Homo sapiens
gatactttattatgtgtgtggattgtgtaatgatgaagtcagggcatttagggtcttcatcaccttgattatcatttctatgtgttgagaacatttcaagttctcagttccagctattttgaaatagacagtccattttgttagctacagtcacccaacccggctgtcagacattggaacttactcctattgaactgtrtatttgtacccattcaccaaactctctttgggctttcagttttacaactgggatgatcctgggaaaactaaagtaaatcagacacccgacgtgtgagctaggttataatatgcccagtggaccctggggacatcttagctttcagaggtcatgctgtccaagctgactgtggggcttccagaaggtggggagaggaa

SEQ ID NO: 692 - DNA, 396 bp, Homo sapiens
tatgtgtgtggattgtgtaatgatgaagtcagggcatttagggtcttcatcaccttgattatcatttctatgtgttgagaacatttcaagttctcagttccagctattttgaaatagacagtccattttgttagctacagtcacccaacccggctgtcagacattggaacttactcctattgaactgtgtatttgtacycattcaccaaactctctttgggctttcagttttacaactgggatgatcctgggaaaactaaagtaaatcagacacccgacgtgtgagctaggttataatatgcccagtggaccctggggacatcttagctttcagaggtcatgctgtccaagctgactgtggggcttccagaaggtggggagaggaaatgatgcaat

SEQ ID NO: 693 - DNA, 396 bp, Homo sapiens
tgggaaaactaaagtaaatcagacacccgacgtgtgagctaggttataatatgcccagtggaccctggggacatcttagctttcagaggtcatgctgtccaagctgactgtggggcttccagaaggtggggagaggaaatgatgcaatggcccatcagaggcactacttggggcctggggccagagtgcatgtctaagscattaaggggaggggagagcagccttcataattatgaagaggagtctcaggtgcacagcttctgatgagggacagcttctaattgaagacagcattgtgtaatgctcaaactccctgtcttcagagtgcctgctgtatcccaccatcagttctgtgacttctccctaagcctcaattttgcatgtgttacattggga

SEQ ID NO: 694 - DNA, 396 bp, Homo sapiens
cctgcatagcaaattcttgcaaatgtagggactcaaaacaatataaatttattatctgacagtttttctgggtcagaggtcttactaggctgtaatcagagggcaaccaaagctgtgatctcagctgaagctcaggattctcttccaagctcactggttgttggcagaattcagttctttccagttggaagactaaagyctacagtcttcagtctctagaagccttttctctggcacaggtttctctacaacatggccatttatgtctttaaggccaataggagaacatgattagcatattttttttaagtgaactttagacccttttttaaaggcctatctgattaggccaggcccaagtgagctttaagtcaactgattagagatcttaattac

SEQ ID NO: 695 - DNA, 396 bp, Homo sapiens
ctgaagctcaggattctcttccaagctcactggttgttggcagaattcagttctttccagttggaagactaaagcctacagtcttcagtctctagaagccttttctctggcacaggtttctctacaacatggccatttatgtctttaaggccaataggagaacatgattagcatattttttttaagtgaactttagacycttttttaaaggcctatctgattaggccaggcccaagtgagctttaagtcaactgattagagatcttaattacatctgcaaagtcccttcatgtttaccgtataacataacttagtgaaaggagtgaaattgcaaccaggttctgcctgcactccacggaaggggattctgcagaagtgtgggtcacgggggggtta

SEQ ID NO: 696 - DNA, 396 bp, Homo sapiens
agaacatgattagcatattttttttaagtgaactttagacccttttttaaaggcctatctgattaggccaggcccaagtgagctttaagtcaactgattagagatcttaattacatctgcaaagtcccttcatgtttaccgtataacataacttagtgaaaggagtgaaattgcaaccaggttctgcctgcactccacrgaaggggattctgcagaagtgtgggtcacgggggggttattttgggattctgcctacgtcactgagtcaaaagaagctgaatggttgtgatgctgaggtttttgggcagcagcagtgtgtgtgtgtgagtgaattcatacgtatgaccacctgggaagaaaggaggctgtggtttcctccacctcctggcagacaga

SEQ ID NO: 697 - DNA, 396 bp, Homo sapiens
gggattacagacacacactgccacgcctggctaatttttgtatttttagtagagacgaggttttgccatgttggccaggctggtcttgaactcctgacctcaagtgatccgcccacctcagcctcccaaagtgctgggattacagacgtgagccaccattaaccatttttctatctcctgtgggaaagggcacagtgaragaacagatgaagctgagacatacaagtgaactcctccctcctctccatttagactaaaataggattattcatactgagattctccctggttgcaaagagataatctgtgcaactgggtttttacaattatccctaccctatgctttcctcatctgtcttcctcgtagtcagctcaggctgctataacaaaacacca

SEQ ID NO: 698 - DNA, 396 bp, Homo sapiens
ggcagattcggtgtctaatgaggtcctgctttccagtttatagacagtgccttatcgctaccgccttacacagtggaaggagaggacgagaagctccttgggcttttttttgtttctttctttctctctctctctcttttttttttttttaataaggtcactatcttagtccattttgtgttgctaaaaggaacatctraggttgagtaatttattttattttaaaaagtggccaggcatggaggcttatcctgtaaccctaatcctttaggaggccaaaacagcaggattgtttgaggccaggagttcaagaccagcctaggcaagatagtgagaccccatctaccccatctctactaaaattttaaaaaattagctgtgtgttgtaaagtgtgc

SEQ ID NO: 699 - DNA, 396 bp, Homo sapiens
aatttattttattttaaaaagtggccaggcatggaggcttatcctgtaaccctaatcctttaggaggccaaaacagcaggattgtttgaggccaggagttcaagaccagcctaggcaagatagtgagaccccatctaccccatctctactaaaattttaaaaaattagctgtgtgttgtaaagtgtgcttgtagtcccrgccacttgagaggctgaggtgggtggagttcaaggctgcagtgagttatgattgagccactgcactccaacccgggtaacggggcaagaccttgtctctatttaaaaaaaaaaaatctttatgtggctcactattctgggtggctggaaagttcaagattgggcatctgcatctggtgacagcctcatgtcgcttcc

SEQ ID NO: 700 - DNA, 396 bp, Homo sapiens
taaccctaatcctttaggaggccaaaacagcaggattgtttgaggccaggagttcaagaccagcctaggcaagatagtgagaccccatctaccccatctctactaaaattttaaaaaattagctgtgtgttgtaaagtgtgcttgtagtcccggccacttgagaggctgaggtgggtggagttcaaggctgcagtgagwtatgattgagccactgcactccaacccgggtaacggggcaagaccttgtctctatttaaaaaaaaaaaatctttatgtggctcactattctgggtggctggaaagttcaagattgggcatctgcatctggtgacagcctcatgtcgcttccagtcatgggggaagacgaaggagagctggcacgtgcagatatcacg

SEQ ID NO: 701 - DNA, 396 bp, Homo sapiens
atcctttaggaggccaaaacagcaggattgtttgaggccaggagttcaagaccagcctaggcaagatagtgagaccccatctaccccatctctactaaaattttaaaaaattagctgtgtgttgtaaagtgtgcttgtagtcccggccacttgagaggctgaggtgggtggagttcaaggctgcagtgagttatgattragccactgcactccaacccgggtaacggggcaagaccttgtctctatttaaaaaaaaaaaatctttatgtggctcactattctgggtggctggaaagttcaagattgggcatctgcatctggtgacagcctcatgtcgcttccagtcatgggggaagacgaaggagagctggcacgtgcagatatcacgtgttgagg

SEQ ID NO: 702 - DNA, 396 bp, Homo sapiens
ttaaaaaattagctgtgtgttgtaaagtgtgcttgtagtcccggccacttgagaggctgaggtgggtggagttcaaggctgcagtgagttatgattgagccactgcactccaacccgggtaacggggcaagaccttgtctctatttaaaaaaaaaaaatctttatgtggctcactattctgggtggctggaaagttcargattgggcatctgcatctggtgacagcctcatgtcgcttccagtcatgggggaagacgaaggagagctggcacgtgcagatatcacgtgttgagggcagaagcgagagagagaggggagagatgccaggctctttttaacaaccagcactggggaaactaatagagtgagagctcactgactcctgagggaggacat

SEQ ID NO: 703 - DNA, 396 bp, Homo sapiens
atgggggaagacgaaggagagctggcacgtgcagatatcacgtgttgagggcagaagcgagagagagaggggagagatgccaggctctttttaacaaccagcactggggaaactaatagagtgagagctcactgactcctgagggaggacattaatctattgatgagcgacctgcctccatgacccaaacacctccaaygataccccacctccaacactgccacactagggattaactttcaacttgagatttagaggggggaaacttacaaactatcgcaggcactaataccactcatgagggctccaccttcatgacctaatcacttcctaaaggccttacctcttaatctcatcacattgaggattcgatttcaacttgaattttggggggac

SEQ ID NO: 704 - DNA, 396 bp, Homo sapiens
ctcgctgccacctgaaattagatcatttatttacccctttatttgttcagtttgccttgtccgttagaatataagcttccaaagggcaggagctttgcctatattgttaggccgggcatacaatgagcactcaaaaaaatatttgatgagtgtatgaaagaacagactgggttatgtaattgtgcctacttacctataygaccgtgtggtggggtttatggtgggtgtggtggtgatggctatagggctataagcaaatttgggacagggagtctaagaaatgttcttaaattttagtaagcaaagcatcctctacagaacctgtcttaaaacatgaaagttccttagtgctacccccagaggtatgatttggtaggtcaaggatagggcctggaa

SEQ ID NO: 705 - DNA, 396 bp, Homo sapiens
tgccacctgaaattagatcatttatttacccctttatttgttcagtttgccttgtccgttagaatataagcttccaaagggcaggagctttgcctatattgttaggccgggcatacaatgagcactcaaaaaaatatttgatgagtgtatgaaagaacagactgggttatgtaattgtgcctacttacctatatgaccrtgtggtggggtttatggtgggtgtggtggtgatggctatagggctataagcaaatttgggacagggagtctaagaaatgttcttaaattttagtaagcaaagcatcctctacagaacctgtcttaaaacatgaaagttccttagtgctacccccagaggtatgatttggtaggtcaaggatagggcctggaaattca

SEQ ID NO: 706 - DNA, 396 bp, Homo sapiens
cctgtcttaaaacatgaaagttccttagtgctacccccagaggtatgatttggtaggtcaaggatagggcctggaaattcacattcttgttaagatgttcttcatccggggtttgttgaccaccttttcagaagatttttgctctgtagctgtactacccaatgcagtagttcgtagtcagtgtggctcctgagccctygaagtgtagctcctctgaactgagacgtgctgtaaatgtaaattgcacaccggagtttgaagagttaatacaaagaaaaaggaatgcaaaacatctcattaataatgctttacactgattacatattgaaatggtaatcttgtagatatagtgcgttaaataaaatatactgttaggcttaatttcacgtctttata

SEQ ID NO: 707 - DNA, 396 bp, Homo sapiens
tcagccaatcaacaagagggcaaaagaacaaacatttgatgtgtaattacttaatttagtgcatatgcatttgggtcctcaatgtcagcactatggcaaccagaacatggccacaataactgtctggaaatgtctattcttacctggacccagcaggccatgccccactgattatataatctccctctctccttgttayggtctgaatgcttgcatccctcaaaaattcatgtgttgaaatcctaacccccaaggtgatgatattaggaggtcggccttttgagaggtaattaggtcatgaagacagcatcctcatgaatgggattagtgtccttataaaataggcccaagggagctcattcactttgtccaccatgtgagaacacagcgagaggg

SEQ ID NO: 708 - DNA, 396 bp, Homo sapiens
ccttgttacggtctgaatgcttgcatccctcaaaaattcatgtgttgaaatcctaacccccaaggtgatgatattaggaggtcggccttttgagaggtaattaggtcatgaagacagcatcctcatgaatgggattagtgtccttataaaataggcccaagggagctcattcactttgtccaccatgtgagaacacagygagagggcaccatttatgcaccaggaaatgggccttttccagacaatctgtcggtgcctggatcttggacttcacagcctctagaactgtgagaaattaatttgttttttataagccaccaaatctatggttttttttatagaaaccgtaatggactaaaacactccctaattatatttaaacttatcagtgcactg

SEQ ID NO: 709 - DNA, 396 bp, Homo sapiens
ctaacccccaaggtgatgatattaggaggtcggccttttgagaggtaattaggtcatgaagacagcatcctcatgaatgggattagtgtccttataaaataggcccaagggagctcattcactttgtccaccatgtgagaacacagcgagagggcaccatttatgcaccaggaaatgggccttttccagacaatctgtyggtgcctggatcttggacttcacagcctctagaactgtgagaaattaatttgttttttataagccaccaaatctatggttttttttatagaaaccgtaatggactaaaacactccctaattatatttaaacttatcagtgcactgggcagtgacatattaaaagaatgctggccaacgtaattgacaccataaggct

SEQ ID NO: 710 - DNA, 396 bp, Homo sapiens
tcatctcattttaaccttttgtttcaaagcctctcttttcatgacttccccgccttcatttttcccatatggtggggttattattaagacattaaatgagagtggacaggtaggcaaaggaggtgggttgcaggggagttgagggttgcctgtgtacttttctagactgttccacttcacatcagtgaaatattcccarttgatactatcatgaaacaaagcaaatgaaatgctgagcacggagcttcgtcttgatgaaatgctgaaagaaaagaaaggaaaaataaagtagccattatttttgcccttcctcccacccccatgtttactactcttatttctcttttgtattgttgtgttggaagcacagcatcagaaaaactcccagttttgaga

SEQ ID NO: 711 - DNA, 396 bp, Homo sapiens
acaggtaggcaaaggaggtgggttgcaggggagttgagggttgcctgtgtacttttctagactgttccacttcacatcagtgaaatattcccaattgatactatcatgaaacaaagcaaatgaaatgctgagcacggagcttcgtcttgatgaaatgctgaaagaaaagaaaggaaaaataaagtagccattatttttrcccttcctcccacccccatgtttactactcttatttctcttttgtattgttgtgttggaagcacagcatcagaaaaactcccagttttgagagataactcagtgtttagttcacttaaacctgagaaaggagaagaggatgccaccgtgaggtccaggacgtaaagaggaaaaaaacagacaaaaaaatccatatga

SEQ ID NO: 712 - DNA, 396 bp, Homo sapiens
caggtaggcaaaggaggtgggttgcaggggagttgagggttgcctgtgtacttttctagactgttccacttcacatcagtgaaatattcccaattgatactatcatgaaacaaagcaaatgaaatgctgagcacggagcttcgtcttgatgaaatgctgaaagaaaagaaaggaaaaataaagtagccattatttttgmccttcctcccacccccatgtttactactcttatttctcttttgtattgttgtgttggaagcacagcatcagaaaaactcccagttttgagagataactcagtgtttagttcacttaaacctgagaaaggagaagaggatgccaccgtgaggtccaggacgtaaagaggaaaaaaacagacaaaaaaatccatatgaa

SEQ ID NO: 713 - DNA, 396 bp, Homo sapiens
ttcgtcttgatgaaatgctgaaagaaaagaaaggaaaaataaagtagccattatttttgcccttcctcccacccccatgtttactactcttatttctcttttgtattgttgtgttggaagcacagcatcagaaaaactcccagttttgagagataactcagtgtttagttcacttaaacctgagaaaggagaagaggaygccaccgtgaggtccaggacgtaaagaggaaaaaaacagacaaaaaaatccatatgaaatgaaaatgtgaaagaggcgctttcgagcagatgagtgttgtagattacagtgttgagagctgtttgtgtccagagctgcttgctgcacctggcgggataaacactggtctaacagaggatccttgtttcaaggaggct

SEQ ID NO: 714 - DNA, 396 bp, Homo sapiens
aagaaaagaaaggaaaaataaagtagccattatttttgcccttcctcccacccccatgtttactactcttatttctcttttgtattgttgtgttggaagcacagcatcagaaaaactcccagttttgagagataactcagtgtttagttcacttaaacctgagaaaggagaagaggatgccaccgtgaggtccaggacrtaaagaggaaaaaaacagacaaaaaaatccatatgaaatgaaaatgtgaaagaggcgctttcgagcagatgagtgttgtagattacagtgttgagagctgtttgtgtccagagctgcttgctgcacctggcgggataaacactggtctaacagaggatccttgtttcaaggaggctgccttttatttggggggacaa

SEQ ID NO: 715 - DNA, 396 bp, Homo sapiens
attatttttgcccttcctcccacccccatgtttactactcttatttctcttttgtattgttgtgttggaagcacagcatcagaaaaactcccagttttgagagataactcagtgtttagttcacttaaacctgagaaaggagaagaggatgccaccgtgaggtccaggacgtaaagaggaaaaaaacagacaaaaaaayccatatgaaatgaaaatgtgaaagaggcgctttcgagcagatgagtgttgtagattacagtgttgagagctgtttgtgtccagagctgcttgctgcacctggcgggataaacactggtctaacagaggatccttgtttcaaggaggctgccttttatttggggggacaaaattgttcttgaaagctgctcagtggtt

SEQ ID NO: 716 - DNA, 396 bp, Homo sapiens
tttgtattgttgtgttggaagcacagcatcagaaaaactcccagttttgagagataactcagtgtttagttcacttaaacctgagaaaggagaagaggatgccaccgtgaggtccaggacgtaaagaggaaaaaaacagacaaaaaaatccatatgaaatgaaaatgtgaaagaggcgctttcgagcagatgagtgttrtagattacagtgttgagagctgtttgtgtccagagctgcttgctgcacctggcgggataaacactggtctaacagaggatccttgtttcaaggaggctgccttttatttggggggacaaaattgttcttgaaagctgctcagtggttcaagctacagcatggtggactagcagaatggactccagggcctccgagga

SEQ ID NO: 717 - DNA, 396 bp, Homo sapiens
ttttgagagataactcagtgtttagttcacttaaacctgagaaaggagaagaggatgccaccgtgaggtccaggacgtaaagaggaaaaaaacagacaaaaaaatccatatgaaatgaaaatgtgaaagaggcgctttcgagcagatgagtgttgtagattacagtgttgagagctgtttgtgtccagagctgcttgcygcacctggcgggataaacactggtctaacagaggatccttgtttcaaggaggctgccttttatttggggggacaaaattgttcttgaaagctgctcagtggttcaagctacagcatggtggactagcagaatggactccagggcctccgaggagacagtgactgctgccagaaatagtcaaggatagaaaggaagga

SEQ ID NO: 718 - DNA, 100001 bp, Homo sapiens
taaggcatatcatgcaaagtaaaattagccaaagaaagtcaactggtggagagcttgttgaagcaaatttaaaaaaaaaaaaaaaggttaacaaaagtctaatgtttttagaaaaaattgctatcaatctgtttccaaatttgaattcatctaatgctaagagtaaaaaacaggcacatacaattgtggttattcttctcacccttaagagtgagtggcctgttgaaactgttaagaaagaaagaaaagttttataatctgaaaatacctggtgggtcttgaaccacgacaacaggaacacagtgctgaatttagcaactataatactgccatcagcctaaccaacgtaggctttagaagaactgaatgatacaatggattgatctacctaggaaagttctcaggtctctccttcagcctagtattgctttgtgctaaactgactgccctctcatctgctacttcatgacaaagcccattaaaggtcctcagactccgggattttggtggatttcttgtgcagaaattgcagtgaaaaggctgttggagaaagaggtcttgattctggaatatgctccattctgtatttttcaatgtatggagcagctacttcccaaacctgaaaagcaaggacaaaacaaagttgaaatattgacgacattgtttccacatgctattaaacatcaacttcatccgaagtcaaaacatactctatacatgaccagacacagctgctgtttgcttgcttttattttaagccatttgacacatgacctgtgtcaattagtctttggttgcattaaagactgtaaatatacaaagtccaaaactttctaaagtcatcataaagattttaagctgcatacttttcctaagcaaaacaagcaagcaaataacaaaacccagagaattcagtgtggatagagtgaaggatagttgctccagggtcttaacagtacctatgtggtttttttcttgtttttttgttttttttctttttttgtgagacagagtctcactctgtcgcccaggctggagtgcagtagcatgatctcagctcactgcaacctccaccttccaggttcaagcaattcttgtgcctcagcctcctgagtagctgggattacaggtgcatgccaccaggcccagctaatttttgtatttttagcagagatggggtttcaccatgttggccaggctggtctcgaatttctggcctcaagtgatccacccaccacagcttcccaaagtgctgggattacaggcgtgagccaccacacatggcctggacctgtgtgttttctaaagcaagccttaaatggtaaaaggcagtgaattgtatttccctattgccttatttccatgccacaggtgctctgttcctttgaccctgctactcaaagcgtggcctgtgcccctgcagtatcagcatcacctgggacaagtcagaatcttggccttcacccagacctactgaatccacacctgcattttaacaagatgcccagcagattcatagccactttaatgttggagaggcactgcctcagatccttggttagcttttgcctcccacccaccaacctcttttttctttttttttttttttcttaagcataacatcatctcaaagtaaggccctggacgggcatggtggcatgtgcctgtagtcccagctactcaagaagccaaagtgggaggatcacttgagcccaggagtttgagtccagccttggcaacatagcaagacccgcatctctaaaaaaatttttttttaaattgaatgaaattaaggccctgtttttggtttatatctgctttttaactgattgccactgacagccaaggagcctttcctattattttttatgaccttagcaaatgaatactcttaaaggctaacctctcgtatacctccctcctagcaccaaagttggcagcaggcaagcagcttccccatccagagtgcagggcatgcttagaaataatgggtgtgaaaatcacagggaaaaatcactgccccagagcagagcaactgttttaaggaaatcaagcgattctagggaacataacacccacaagttattcaaaaggtttaaagcacttcaaaaacgatatttaaaagataagccagcatgctgggcatctgtacctggcagctgagtatacggtcaatgtaaccagtggaaatatgcaagaaagaaaaacccgcatctcaccagagcactagacagaccgaaagtcttctgaagtaaacacccgggccttggttttctctccaggtctacgcagccattgcacccagtggtggtagttgtgatagcatcacccagaagggaacgcacttttgaatcaaagaggacatcttgcaggggtggggaggcatcaatgaacctgacatcttatttttttccccatgaatattgtcccaaaactccatttaaaatccatttctgtttctaatccttagatattcaaccgttggctgcaccctggtgcacttagtgtttattatatggcttcttagtggtgctgcaagttgttgctcaaatacctttttgctcattcccaaggaatggccagaaaacaatagaataaggcaatgtttctccatccccgactttgctttcctgtaacaattaaaaattaagaaacaagccaaggagccagcttgccttctgctccaggagcagcctgtgggctgcctcgatgtccggggccatgaagcgatcttttatccagggcctacagggagagcacatccgcccatcagccaaacatgaaaccctgccagggttcacagtgctgaactgatgtaattttcagagacctgtttgatcttaccttacaacagagcgcaccaggtcatagaccttctccagcggagtggttgttttcaggggacgtagaaactctatgccctggcaggctgcaaggagctcgatggccagcactgaaacaagaaattccaagagggtagcttatgaaagtctgacttcatgcttaaggaatgtggatttcccaaagttgacacccatcaccacccaactaacagatggtttgttctctgtctattggtagaatgaagttgctttggtatttagttgccattttaacctgttttctaaccccttgactatatctttaatgctgagaaggggagaattgagacatttacctgaataattaccagacctgcacacctacccaggaagctgcccattcatctgcactagcaaaatctgccatgtcccccattcacatcctctaacaaaggtttgttggccaagtttgggtcatgtgggtagggaaggaagtcagaaagaagagctgatcctcatcttgagccccagttctattaaataattgtatgcatttcatcaagatgctttacatctcgtggtttccaattccatatgaattgcggggtggggatactggactagaagatgagaaattgcttccaggtccaccgtgaattccacaacttcatcctctcccactgtgacctgtctgcactcactagagttcatagtgtacttcataaattgaatgtgctgttgaatcaaggtggggtgtgagagttcatggtactcttctctccactttgaatatgttttaaaagtctcattaaaaaaaaaaccactttgggggtgaggtgggaggatcgcttgaggccaagagtttgagaccagccaaggcaacacagcaagaccccatctttacaaaaaatttaaaaattacccaggtgtggtggtgcttgcctgaggtgtcagttacttaggagactaaggaaggaggatcacttgagcctgggagttcaaggctgcagtgagctattgttgcaacactgcactccagcctgggtggcagatagagatcctgcctcaaaaaaaaaaaaaaaaaaagagaaaaaaaaagccagccaaaggaccagcttagttctgcatggttccttggttcttaatctttagtgaagatcagaatcacctggagggttcgttaaacacagattgctccgctctcctcctggagtgtctgaattagccagcctgcaaggaggcctgagagtctgccttcctaacaagtttccaggtgatgctgatgttgctggtgggagatcccacttgagaaccacgggcacagtggtctatcaggcaggcccgccaccccgaactcatcagcattaccttgctccacatgctcgatgaccctgagggctttccttgctgcccatcctcccatggagacgtggtcctccgtggctgcgctggtggagagggagtcaacagacgagggatggcacagagccttgttctcagaaactgcaagagaccagtgccagttaagaagtgctcctcacaggatgagctgtctaaaggacccgtggcttccacagagtgctccacagcatgggatacactctccagaagatcttggacattatccaagcacctgatggtagaaagctgctttgggaaaaggaagcaggtcattttttttccccaagtgaggactctaaagcaatagtgagttctgaggtaagacggagatgggagaactgggaattctaatataacaaggccaagatgacaacctgggaagcatatagcatgccagggagactaggggagaaagagacatgatggccattttcaggtacttgacgtcaatttggttgtgtcaccagaattccgatgtggcatttggggactgaggctggacccataaatcttgggcaagaagatttaacacttcagagtgttcaaggatgacataaatggatgtaaacaggggctcgatgactgccagaaatatctgggaggtgggggaattctagggaggaccaagacatgggactctcaagctttccagtgcacatgaatcactcagggaccttgttataacaaatatactgagctttgggtggggcgtgaaattctgctgttctaacgagctctcaggtgatggccatattgttggtctgaggactacactataagtagcaaaaacttaggttatgaagttccctcaccctagcttagaagtcaggaaaggtcagactcaaagtctcttctcctctttctctggctttaagagtggtcatgggtgaggcttcagttgttttctatgctgcatgggatcgcatcctaagatgatctcgctttaaactagggtcatgctactttgtcaaggtcatgttggttggccaaggactttccaggtttcagcactgtaagtcccaagtccttggaccctaaactgtggactatacagataagtaaactgtggtaaggcttgttcggaaagataacttacaagggccaaaaaaagaaaaacactaattttactacaatgaaagcaagccaaacaacctcaataggcagcttgggaaactaaaacatattcaaatgaggcttcccaatgtccatcctgttctctagaaatcaatgactactcccccactactacgttattgtgagaaatttctacctgttaaaggggtattttattaataagcaagtaagcaaatagaagataccggtcagaggaggtgaattcagtggctcttagttggttatttgtgttcgttgggaataatattaatagcaactagtatttttttagtgcttatgatgtgccaggctttatatacatcaattcatttaatcctccaaacaacccccttaggtaaactgatctccattttatgcaggtgtaaattgaggatcaacaggataaagaggctcacagagctagtaaatggcagagctgggcttctgatctagcatctacgcatgtaataactcatgctatcctgccttttagggtagggttgttagataaagtaaaggatgcccagttaaattttgattttagattaaaaaaataatttttgtagtacaagtatgtcccaaataattcaaatttaactagtcatcctgtgtttttgttaaatttgacaaccctattttaggattaagtattgattaaaatgagatcctcattaattgaagtaaaagcacatttttgcatgccaaaattcagggtttgaattctgctttacatcttgctagctgtgcaatattgggcaagtcacttaactctcagatcttcagatattcatctatagataacaataatagcacttacctcaggtgacaattgtgcaattaagtgaatgaacataaatgaggcccttagtacttacttagtgccaggcactgttctgatgtgttaatctgtctcttacaatcttgagtcagaaataaactatattgaagctcaatcttcacagagggtatcctgattcttataagcatttttttaatgttgcaataacatctttatgtttttagtggttgttatatctagtgaaatgaatccaaagtttaattataggtttaaaagttcaaagtttaattataggttggttcaagtttcaccattaactataaccatcttagtctttttccaatagtcttcaaatggagatttggaaaaaagctatagagatgaagttcatatgcaatgtcaaattgctttccacagagaaattgtccattacagccttattattgtattattatatttcagcataacagtatcgaagtttttaaactatttttttctgaaaaatattagagttaacctgttacctttgcactgagagaactaggatgcagataaaagtggtgaaaagttagatctcactcacagaccacatttgatacttctaggtgaaatggaaagacccttagatggacgggcgtgtgttctgggaaaggggcagtgtccttaccaagggctgctgccgtgcagtgagctatcatgaacccagagttcagaccaccttcagccaccaggaaggcaggcagctcactgagggagggattgcagagccgctcgattcttctctcactgattgcagcaagttcatggatgccaatggccaagtagtctagggcctgaaagagggtctccatttagtcagcctatattgaaatgtgccttctgggtcaggagcagttttaaaaagcttactttggctgggtattcaccatggaagtttcctccagaaactgtctctcccctattggcaaagaccatctttcaaaagaggttaaggcttgaagataatgtttgctggtcacttcaagtacaaccccttcctgccttcttttttaacgtggaggtggcagtctgtgtacaaatgtggggtggagggaaagagacaagtcttcctgcaagagatataaaggggcacaaaagcaaaaaacaaaaagccttaaaggtggatcatgtacacccaatttggaggctgaaaaaacatgaaccttgaaatgatgttttctcttgagattagattctaaagcaccataactgtactaacctggtggttagtacctgccctcaaaaggtttatagcctgaaactaaaaacagagaccaacacatctgtttgaaagcaacttctgtttcttcaatgggcactgcaaatttgtgttccatagaagaatctgttgaatgggaaactctgctgatgagcaactaccaaaatgtctggaacaatcaattttgagaaaattttcaaattctttactcagtaatctggtgtcagcgttcaacagcagatggtggccaatatgtcctcatgaatccattttaagtaggtggcaagtttaaatttgctgaatattattactctgaggtaattctttttttattttctgtatcattctgtcacccaggctggagtgcaggggcgccatctcggctcactgcgacctctgcctcccgggttcaagtgatttcttgtgcctcagcctcctgagtagctgggattacaggcatgcaccatcacacccagttaaattttgtatttttagtagagacagggttttgccatgttggccaggctggtcttggactcttggcctcaagtgatcagcccaccttggcctcccaaagtgctgggattacaggtgtgagccaccaaacccagcctcagataattctattccatcatgcactttacttaaaccagcaagcacccaggaaaaggcagtaacagatccttcttcctggttctaaagagctaatctttgcctcttgggctcaagaatattcattacctattaactgagaacttgctgtgtgcaagaaagtttctaactttgaaagagttagagatgtatgtgttacattaacctactcaagtgtggattactctgttctgcatgtgtaactgtgagcccattgggtctagctccttggtcttggcctcttctccattctctgaatccctatagcaatggaattctgcatcaatttagaacttagacatgtttttattgtcctctagttgttccaaatttgtttgttggctattagattaaaacaattagaatttaactcccataatatccagcatgtgtgatggggctccgtatctgcaacagaaaattgagacacatattctttcaggtaacagcagtattgcaagagaactcccaaatattagcctattggaaatttatcaataattagcaatctttaattgaaaaaaataaaagacttttggctgaaattcttgctgaggcaattggtagcagaagaatttagtgaggaattaattatcccctgccccatattcagtaattgaatggtaatttctaaaaactatgagataccctttaaaagcaatgatgtaaatgtagaatagatacctcttccctacagtgaaaagactggtacgtgagataagactacatagagttcataaaaactactattccatctgggggatggggtggtattgaggtgaatggagagacccacaatttctgaggcttatttagtgtgggtttgacttcagtgtaaaacaatgtgagagaacataaaacacacattctgaagtaagcttgtcaaaaaacacatacatacaaaagccatctcatgggaaaccttatggagctatcacataaccatcttctaactcagcctgtgacctgcttttggggctgcttactcagcactttctctaggattcagaactgaggcagatgtggaataggaaaaatagattccaaaggcgtttgattatcttcagaggcagtgctatctccatgaaaactgtgccagtgtgactcctgactgatcacctcaacatctggggaactgagccatcatggaacattccagagaaaaaccagatggctctgagataagccacaccattaagagaggacctccatccttgagaaatggaatcagttttactatttctttgaacaaacgcaaaagcactaatttgagcaaagtgcgcatgacaaataaaaactcatgatgggggctgggtgtagtcgctcacacctgtaatcccggcactttgggaggccgaggcaggtggatcacttgaggtcaggagtttgagaccagcctggccaacacagcaaaaccctgtctctactaaaaatacaaatattagccaggcctgctggcacatgcctgtaattccagctactcaggaggctgaggcaggagaatcgcttgaacccgtgaggcagaggttgcagagagccgagatggcaccactgcactccagcctaggagacagagtgagactccgtctaaaaataaacaaaaaaaaaaatgccaaaaacctcaggatgaggaagccataactctttaatcaatactttggtaagtgttaaaaggctgacctctgcataatgcaaactgctctcactcaaagcagagaggcctgcataaattgttcagcatttctgcaatcacatttgtgacccacgtcttcacccttccaccaacaaccttggcagtgggttttagggccagtgtcttcaggaaacatgtcagccaatgctggaaatatcttcttaaatcttgaataggtccattttgaaagtacagcatgttagacttggaacctgagagtaagttcacaggtcacctctgccacttaccagctctgacctggagaaagtcagttaacctctgagcctcaggtactgattcatttactctgtgaaatggagcaatggaactgagaagctacacaaaatgattgtttcagtagatcctaaaattaccagctgcaattctataattgcaggttagtatacaatcaaaagatacaggattatctgttgcgctgttcagttctgtggtaatgatgttcttcacaaatgctattgtatcattcaccacaccatggacctaaaatacaatcaaaataaggtatatgacccatttgattacctgaagagtaccaatattcttaaaagaatatagaagatcttatcttaaagttataaagaatacagaagatcttattttaaagttataaccatggaaattatttgaactgaagataattttgttataattcttttgggttttcactgaaacaaattagaataaattcattatcatatatattcacattagatcaatctatacaaagcagcatggtgtgggaggaagaatgccaactctagacacaggcagattcactcccaggttagtggtaggacttgggcaagttccttaggtttatagttaaaagataggaagacttagaaaagagacaatagcacttatggcttttgagaagtacataaaataatgcaaacaaattcttagatgtgactcgcagagattactcaaatggtagctattatccaaggcggtaaagttcattaagcacgaaggcatcacattagaagatgctcacacataaggcagctacgctgtacaaaccccagaaatagccacaatgctataaagcagcacctggctctggtttctcccagaagtcaaggaagtaattatctgtctgtgtgatcgtgggcaagatacttaattctgtgcctcagtttccccattgcaaaatgggagaaagagtatcttatagttgggaagattaaatgaattaataaatgaaagacagtgataatggtgcctgtcacatagaatctgctatcgttattaaaatatcagggaagtcttacatcaggacttaatcttcctgtagatctaatttggcaattcttacccataggtgttttgatctattgctcaataagctagctagaaaagataacttgctgactaaagggaaatgagggtatttattctagggaggactctctattacaccatagactgaaatttggcacagaccaaaatatggtttattgagatgactggctctctaactgtcatatgtaaattacacatctgtaatacagatgcctaatgccaacccaggtcatctgcatttttaatttaaagttaagcatcacaaattcatttaaaataatttatattgcccataaaatgcaagtaaggtataaccattactatgcacctgagtttcaaaatgatataattaagactttcctgtaaacacctctgactatctggttaaagtttcatcttaacagggagaaacagtacaactctactaactggttatgattttattactaagaatttttaaaagttagggcactgaatcaacataagaggttgtctgggccggggacggtcctcacgcctgtaatcccagcactttgggaggctgaggcaggtggatcatttgaggtcaggggttcgagaccagcttggccaacatggtgagaccccatctctactaaaaatacaaaaattaggcatggtggcacatgcctgtaatcccatctactcgggaggttgaggcaggagaatcacttgaacctgggaggtgaagattgtagtgaacagagatcatgccactgtactccagccagggtgacagagtgagactctgtctccaaatcaaagaggttatttgttggttgtctgtctcaaaaaaaaaaaaaaaaaaaaaaagaggttgtcctctgaaagtaggttgaacaatcaaaagaaaacaaatagttcaccatatagaatagaaactttacaacaattgcacacataaaggtaaaatatacataacttttcatagagacagtaagaaatttggactatagttgaccattacatgtttttctaacactttcctattttaaaatttttcatcctgaacctggggaaagaaaaactttattggcattttttattgacctttttttttttctttattttacctgtggacagcagcgcaaggtgtatgcatcctggacgcgatcacagaacctgtgactctctgtggaagaggtggaggggatgagacagggatcatgttaccaattcttttcacaaaacacgtaaccaaataggtcactcccataaacatggtcagacctgctatttctgatgggtggtgatctgagtccaagagtgaccgaaaccgaaaagcaacttcaatttgcccacggtgaggtcgaagagcatgaatgtctagaattgatgaaggagaaaaagtctgaataattccatttatttattttttttaaagatgggggtctcactacgttccccaggctggtttcaaactcctgggctctagcgatcctcctaccttggcctcccaaagtgctgggattacaggcatgagccaccatgccaggtcgagtaattctgatattagaacaaatgaccatcaatggttcaggaccatctacggtgctgacacagccctcaaaagtcccaggggtccttagccaccactcagaattagaaacttaactccgaaagcacgattttccttattgacttgactccttctactttaaatatctgagagcaaactatatgttgagaccactgggaattccactcaagacactgggcctaccttaaaggaacagggcgaataacaggagggagccctacagtggcctaatttaactcattcacttttagacaatgttctgccctttttcatattatagttgggaggtcgtcaaaattcactactttctaaataagctaccaattcgacagtttttcttccccaattttctagtcgggaccaactctaatcctactcctttttacaggactcctaagtcctgtaaaaagattcctaagacagcacagagcttgacacacccagatccctgggtgctctcaggcaagtcactcaacttccgggctgtgtgtatctgtaaattgcagttctttcaaagatcagttgtgccatagcctagatgaagaggcagcacactgggtacgccacaggcacttgggttttctccttccctactacctgcccccaccacttctgtgtctaaagatctcagccaccccgccccaccacctctggttgaatgaataacaaccaaaaggaagaaccctgctgaccagtgtcaaaggctttggtggtgcccttcagcacctcaagggtcagggctgccacaatgtcagcctgccgtgcaatagcactggctcgctctacagcttcacagcccagggatgtgatcatctgcgtcccattgatgagtgccaggccctgtcgggggagagagcaaagtttcctactgtgattattgtaacgaacctacatacccgtggattttgtatcttttgctttcataagagaaaaattagccagtcataaacataaaaaattatgtttatgttttctaaagtgcgggacagtaatgtttatttaagcccttgaagaataagtgctatcatatgtgaactcgtaagcacaaatctggcaaatgaaacactcattaagtatccacattcccaaagcagcaatgcagctctggagtgtagactgcacataaaatctttagtgcattaggttgcatttcttccttaaattcttactgttatagatgagacatccaaaaaaacccaattctggtccaagactcttagcttagagcattctaaggaatttgggctgagaacatctatctctcagagatcctaacagaactcgatttgaagttttaagttcctaagagaccccctatgcattgtggcatgaagaatctttttttcttttttgagacagggtcttactgtgttgctcaggctggtgtgcagtggtgcgatcatggctccctgcagccttgacctccagggctcaagtgatcctcccaccttagcctccagggtagctgggattacaagtgtgcgccaccatgcctggctaatttttgtcttttttggcggggcggggggggcgggtagagatgggtttcaccatgttgcccaggctggtctcaaactcctgagctcaggcaatccacctgtctcggcttcccaaagtgctaggattacaggcatccgccaccatgcctggcataaagaatcttttaaattcttacggagttgccccttcttcagggatgaactttaagcaaacatgcaagttgcatttaaggaatgattgaggctgagattaaaactgaaaatactgcataaataaaaactcatgcactatgaacatatttttcttgagtttccttacctcttttggttttaaaataactggtttcaatccatgggcttctagcacctatagaatgattaaaaatatgaaaatgggtatcaaatgaaatactagcctatttccaatatcatatggaatccaataatagctctttatgcccaaaagtccatcttataagaaatgagacctacaggaactggctgtattcatgttctctggtctattctctagttctgttctttagtcatgaaagcagacttatctttcaattaatttttgtactgaaatcaggggctccattgtctatagaatcaaccctaaattttggtttctacgtccttcgtgttcagtttctaccttagcagttcaccttttttaccactgcctcctgacatgcaggcatctgacacacatacatgcatctgtgttgtgctcaggctggactcctcccagttcacgctcccttgcctccagagcttgacctaaaaagtcctctaacctcattagtgcttcatttaaatactggcaaaacctcagagcagggtttttgtggcacatgtgtgagcaccaatgaagaggggattataaaattccctctactagatggagacagaatcccgagggggcgatgggcagaacaatcttcccttgaaagaaaagaagtagagagtcattaagttaaggtctctctaggaaagaaggaaggggaagttaaggtaagagaaggacagagctggtcccatttactacgtcaatttcacagattcaagtatcagctagaggctggattctgttctgggtgttggggtcggtctaggagtaggcaaaatgaagacaggcaagctcagggcaatctgagtaatagtacattcagtgcttgaggatgtgggaagtgggtggggtgcagtggaaaacaatcatttgctaggagagcatacaggagggtcacaaggaactcgagaggtaggaagtggagcagcggagacggaagcttcttagagggcttttctatttttctttttattttttagacacctgtctctgtaacccaggctagagcgagcacagtggtgcaatcctagctcactgcagccttgaactcctgggctcaagtgatcctcagcctcctgagtagctgggactacaggcacatgctactgtgccaggataattttttaattattttatgtagaggcggagcctcgctttcttgcccaggctggtcttgaacttctggcttcaaaagatccctagaagatgtttcagaagcagaaataggagagagaagaacgtatttgtaccagaccctctgcccagaacattccttctccaagcaacctccagtttctgcaatgcagaaccacacatagaagggattaggggctaatgtgacaaacaagacccttgaaagccactttaagtttagcctttatcctgaggacaatgggaagcattacaagttttcaccagaacatgcttgaatttgctgtttagaaaggtcagggtgattgctgtatgagggtggtcggaggaaaacgctgtccatagtgaaataatcaaagacaagcctgcacggaagacagatgatctagaagctgcatccccaaaaggattatctatttccttagctgtttcctcttctggggccctctacccctttcacttactatcagggaagctcccagcagttcatcagggatgatacattaaatgatgctttatgctgctgtaatgaaattcagacacagatgaagaaaacaccaaagctttatcaaaaacaggcttttttgattagccactagggtaagagcttagggaaaaatgaaacctgctttccagaagccatatagtaagtgctatgagccataccactgcacctgtgagaccagctcgtaattaaaattgtgagagtgtgtgacctccctgctaggcactggaaatgttgtaggtgcaggataaatagttgggattaacagtagcagttatgccttttcaccaaggtgatgaccaaacccagaaggctgacagccgagtatagaagctaacaacagtcttgcctagtctgacttctaagctttcgctgtctcatctgtaaagtaaggatagtaggagctccctcactgggctgttgtaaggactaggtgatacgaagcatgcaagcacagttggtgtccaacctggggcaattgctgcagatagaagctgctacgagtcttacgtatttagcatcagcccagccactcttcggagaccacatcttcccttctccaactagcccaagagcaagatgagagagtggggcaaggtctccactggcaccaacggttcctttctctgggacatagggcaggcaggaggctgggagagaagtaggcagcaattagttcaagagtactgcattctgactctccttgctttgccagtgagtgcccccactgcccccgcaaacaccctgcctccaatatctatcactttatggcatagatacctggggaaagacaattcttcaaacccagctaatatgtaagggacctggatgaattgttatagaaagaaaaagaggagtgggggtggagaggaagaagagagaaaggtaaagaggagacagggaggaaaggagggctggagggaaagtcagcaagaaggaaagaagggccaggcgcagtggctcaagcctgtaatcccagcactttgggaggccgaggcgggcatatcacttgagcccaggagttcaagaccagcctgggcaacacggtgaaaccctgtctctgcaaaacatacaaaaattagccaagtatggtggtgcatgcctgtagtcccaactactgggaaggctgagatgggagaatcacttgaacccgtgaggtggaggttgcagtgagccgagattgtgccactgcactccagcctgggtgacaaagcaggatcctgtctcctaaataaataagaagaaggaaggaggacacttctggatgcaaagccctcaaaatctgtgtgctctaattcaacctagtacttccacttgtagaaattttagcaatatatcttgaagaagtgatcaggaactagctgtttttttttgtttttgtttttgttttacagttcattgtttattataggaaaaatagttagaaattatctaaatatgaaattaaaggacattcatttgaccaagtttagccattcacagctattggaaaatgtttggaaacattggaaaagtaatataaaatgttccagaaggaggtggtgcaccaaagcattaacaaggtttcccaggggaagagaagtcataggcaactgagtcttttcattttgccagtcacccagtctacactccactgccccttatcaatgaacacgtgccattttctaagaaattcccaaaaagttaccaaaaaagaggcttcatttttctgaaataaaatcagattcctgacagcagcattttttccaactgttaaataatgtcagtcgggtatggcagtgccatccacagaccaacttctggctgatagttcacgctggggaattctcagaggtgccttagactcccccataaagtacaggtgggtttaaggttggagtgctactatctgggattttagggctatatagtatggcagaccaaggtaggagtaaaaataggtgttggaatcactactagtctgttcagcacagccctgtatatacaatagactgctcattgaaattgctctccactcattggcagatcctattcacgtgccacttgcgtccataacatggaaactcaagaatgtgttttgctgtttgtgactgcctcagcactgcttctcctccctctccttcccctcaaagagttctgagtctccactgacctagaaggcttgtccttacctgtgagaagggacaatacctccaatcactgcaaatctggtttccacattagaattttcctatccaagaagaaagctccagagttgagttccctcatatcctgccactacatggcttcttgattacaagggagtcattaacctctttgcatttctgttctacccttgcaagaagttggattttagtgtgcaagtctggccatcacctgggggacattacgatttcagattcccaggcaccaaccagaactactgaattggcctttgggatggacattgatatcatgcaatttttctaaccatattcatgtaccacttaatccaagtttcttctaggcaggcttgaatgtaagggcagacttaagagtcctgttctagtcttgaagatgacaaatgctagggaaagggtcttgcagaataagttaaagttcataggagtaagcatctctgatcgactttctcctcttcccccatctaactatcctactttttgccaacggcatttcccactcatttcaattatttcatgtcttctcaggtgattcctcagcatctggccaatcaattctaccctgtggtacatgtccagcctccacagaggttccgtctagggagccattgcattaccattaaacatttctatgacttgtttgagggtctccagggaaatgccactgtatcctttggctaagacattgatccttaaagccaagagcatccgacacctctcaggacttagtggtttcccaacacctgcaaaacagaattgatgttttctccaagaaaagcaaactcctttttgtctcctgacaattgccctccctccctccaatctttcccatatgtagcccagcctgctattaccttctcctctcggctcaggtagttggactactctccctcctgcctgtctgacttgtctgagccccatcttcctgacaaaggttaagaccccagttttgccttctcaattcccctttttgggaagcttcagtgaacccctgacctcccactcacctttagaatagcatccagagtccttagcacaacttctttaccatctgatgggtgctgattggtgacagtctttcccatctcactatgcccatcctaactcattctttgagttccaggctttatttccttccctgaatgcaacagtgtctccatggcatgggacatgtgttctcataccaaccccatccctccacctggcccatttctttttctgaggctcagctgattctttctgcatcccttctcacctcggcacctagttcttgaaatgctgttttgagaaactagctttttgtgactataactggataactcacactgtgctgtgctttattcatctaatcacacaagatccaggaggcacccaacgttttgacttacctgaagaatgtgagcgtactaagttgacctgaagctccctgcaacagaaaggtaaaaaccctcttagatacattgcagtgagaaaatgttccctcagctgggaaaatgaagggaatcatggtcaaatccttggagggacagaaggaaggcaatgggagaaaccagccagcctgggttttcaataccaactcacatgcaaggtaacccaagcctcatcctctgatctgtaaattggggcaaatgtgaattatttcccttgttgaaaaatatttaaaagatgagggtaggtggaacgtgaacatatgtgtgttttaaacttactgtagcttattgataggaattacagttctggcaaatttcccaaaacctgtagtaataccgtaaacaactagaataaaaagagacattatgcaattaaatgcagggatttttgtttgtttataaaaatatttataacataaagataaaaagatacctgttttctcttttatgatgctatctatgacctccctggatttctgcaccctcttctcagctgttggggtgagctaggaaaatgttgatcagaactgagcacgttaaagacttccacgggcaacaaaaatggccagaggacatctttcccctccctccccatacctttattttgtagcgtccctttcccaagttgaccagatcctccgtggtcagacggtctccatctaactcgatgtactacacaaaagaaggggatctcagtgagtctgaacagcttgattattctaaccagagtagggacacctccaacagaaccaaactgacatttcagagatctgatcattgcgtgaaacatgaatatgctaaataaaaatgcatcttgcataagaggaggcttattggtgcaaaagcataatgcctttccaagccccctttccccactacagagctggataaagccctgtggttggttggtttgtttgttttgaggcagagtctccagcccaggctggagtgcagtggtacaaacatggctcactgcaacctctgcctcctgggttcaagcaattctcgtgcctcaggctcctgagtagctggtattacaggtgcacgccaccatacctggctaatttttgtacttttagtagagatggggtttcaccatgttggccaggctggtttcaaactgatgacctcaagtgaactgcccacctcggccacccaaagtgctgggactacagacatgagtcactgctcccggccagccctgttctaattgacagtgttttctcagaagttttcctggctttcctccctcttaaataaggggccttaattttctgaagaaaaagaaagtggtttgaagcttaccttttcaggctcccggtacttgctgtatctgtatccaggtaaaggaacatatagggtggtgtggaaaaacccccagccccaccatctgcaggagccacccccagagcagaccaaagagcctgtgggaaaggatacagataaactccttctggttgagatggaatgaagtcaggagacatggcatcaccctctataactaaaacaatgcacgggagactcgttacagatcacattgtacagccatgttccccctgttaaaccaaggaacggcccatcattggcccatgaattctatagaaatggctgctttaaaactgcttcagatggtttcatgtggtcttagcatctttatgtaggaggagagcaaaaagcagaaaggtaggtgtcagggcagagaccaggggtttagatgaaagttcaagacagaattccacttccatccccattcccagctttattttcttcaaaatctgaactgatgctatgctgccggcctccagtctgggggtgggggtggattctttcgaaaggcaaaataacctcaaaatgattcagtcactgcaaagggattcagacctgcagccttgagtaccagtctagtctttgttacttactagctgctggagtctgggtaagttacctcctctctgatttctcctccatcagaggtggaggagaatcctacccatctcacagggttgtgtgaggacttaagatccccagaggcgtggcatgtgcctgcacagggccagcctcggcaagcctgacctctgctcatcattttccctgaggtgggggttcaatgctgcaaagactaagccaggccaaaccgcacccgttcgcggccctctcctgcagccactcacccacttccacgaactcgttgttctctagggccacctcgagccggtcctcgttgtccagcaggcccaggcccttgcaccggcgcacaaggaagtgcgcgtcatccacggaggtgaagccaccattgtcgggcttattcttgatatagcgcctcacggcctcccggcccagccagcccacagtgagctgcgcgtcctggcagggcactgccagccattccccacgtacgtgcaccgtgtatctgggcatggctccgctgcagcctgaggtcctcagctggtcacaggaggggagagctttatgcaggagtggctaccggggtgtggtcagctggaaggatgagaatagactttcaaaccactccccctccttcacctttactcattcatgcattggacaaatatttattgaggtacctgctgtccctttggtttttgtagccgagcaggggcaggagcaggggatgcagacgggtgagcctcctgtccactttccatccagacctgctgccagaaaggcctggggtctcccaccctgggaggtgctgttcttgtccctgatggcacctacctgctgctggccccctttcttcagggtccccaatttctctctcttccctcgtttctgtctgtgttctctgccattaagggcagcttataaacaccatgttcctgtctttatctgagattactcaactgtaaaacgtgttctgtgggccaactgtgacactgggagtgtggcaatcgtcactcatttgtttattccacaaacatgtattgagcaactacttcctgtcaccagtaaggttttctgaagctttctttccaccagggaagactgcaaaggccagagatcattttcacaactaaaggtcgtcatctgggcaaatgaaccactctgacttggagattaggggctcagacagccgtggatgagagtccagctctactacttattagccttgattaggtgagtattaccctgtatttccttatcagaaggcctaggggctaactgcctccttccagtatgtgcaggatttacctgtgatcaaatcctggctctgccatttgctaagtgtatgacttgtgggcaagtgatttgacttctctgggcctcagttgcctcatctgtaaaatgaagataatggtaatgatgatagtatatatgtcaaagggctattgggaggatgaagtcagttcatatatgtaaagccctcaacacaacacctggcatagtggaaatattatagaagtgtctgtgattactagtatctggacaccaatactccatgtaactataatgctttataaatgttctgtatgaatcataaagctataaagttccataaatgctctttcatcttggcacatggatatccctcacccaattaagcttcttcaccacagataactgctccctgcacccgccttattaccattggtattaaggaactctggatagcatgattacggcatcaaagatatgcagatgctattttgactaagcagcactttcatcgtaagccaatttttagagatttgattattgcactagaaaaatcctgaaaagtctgtttccactaaatcagacttctgttgggaagagagacatggttgctcaagaaaaacacctatactcatacccagagtccctctcatctgctgacagcttcccaggaagcgtacaaatagctacccttccttgagccttattgaaacttgctcttcagatacccacaccatgactgcaccctggaatttgtcatgacctgaatttgacacacttaagaaatcaccctggaatctgtcacgacctgaatttgacacacttaagaaatctgaaattccaatattccaccttctgaccacaaccttccagctgcccttttactctagtcactgccagccttggacctgacctccagtcagtctcttcatccctccacttcccaccagcatcctcacttactatcctaggaagctggtccctagtcgctcactggaccactctttcttaagcactctgagattcctttgcatccctaaacttatgtctacacttggaataacacccatccccttagtcatcacaaaaaacagccatctcttggaaggattgcttaagcctaggcagtcaatgctgcaatgagttatgattataccactgtactccagcctgggtgagagcaagaccctgtttaaaattaaaagaaactgtcatatctgttcacccaggcagaagacactgatagagaaagtcctgtgatcacatagtttgatggtattgcccttttattccatccagcccacagtgactttccaaaactttgacccctctgccaggaccttctcgacatccacctctaattctcagaaggagaccttacttcctacatctgtgagaaaactgaggactgcacatgtgaaccaccttaaccttctgccccacccccccccattcattccttgactcatttaacaaatattttttcaacacctgttatgtaacaagctctatgcgaggtgctggggatgaaataaataacaaacacgctctacattcatgaggcttactgtctggtgatggataaagctgtataaagatgactaataagaggtctaactatcttcatgctgcaaaacaacccaaactactgcatgctccagttgactgtcactgccgagaccagcttctgagtaatttcagcccaggcatcagactagtgagggaaggagcttccaggtgataccacctcccagccatgtaagtcacccccagcagtttgaggattctaaactcaggccctacgcattgtggagcagagtcttccttgttattctttctccagaaacgcactttccaacttcctttgcctgtctagatctttcttactccttaagcctgtttaggccttttcttctccaggaagcattccctaaattcttcagttgggttaagtggcccttctctgggatgccttagcatagctcttctttagtattatctaggaaattacttgtctgtgttcatccataattatgtatatatccgatctggcacaaagacatttagcatatgcttactagctgaactgaagaaatgtgaactgcaccgagctggcccctaggtaaaccagcaagcaggattaagtttgtctttagcgccctctaccttcttcacagcacccttccatgccacccttcaagcatcccttgtcacaattcactttcagtatcactaagtgataactaaaaacgacattaacttacagcttgtcttgtaagctcatagggcagaagccttaaagagcagtatttgggtaaatggatttgctaaagtctaatcttagaacatgatcttatgccagtgatttgagctgaactcccttctctgtattcttggcaaggaaggcaagggagagcagagcctggagaaagaatcacactgcagcatagataagtgaccaagaggacagaacgaggcgggtggattgcttgagcccaggagttcgagaccagcctgggcaacatggccaaactctttctctacaaaacaaaaattagccagacatggtggtgcatgcctgtagtctcagctactccagaggctgaggtgggaggatggcttgaacccagaggctgatgctgcagtgagctatggtcatgccactgcactccagcctgggcgacagagtgagaccctgtctcaaaacaaaacaaaacaaaaactgctagggagagtgagagccagggaaaagtcaggattccgggaataggcaggaatatgtctcttccatacctgtcccaccttgggtgttcactcctattgtaactttagtcactgcattagcactttgaggggttatttggtcaggacaccgctccccacccccaccccatgccaacaattatactctaagacaccattcctcttacacaatttatttgaccagaggtggacccaacctgggttagagtctcacctctgggaatttggaattgtgatagcctccccatgtggtcagagctatttgtaacagtaaagctggagagtggccggcctgtacaacgtggactagagaggcagaggtgagggacaggagcactgacggtgctgcagtcctgggcatcagaccccttctgtccgtcccaggttctgataatctccccatacctagcatccttaaaataatcttccttttccctttttgacttctggtcacttggattgctgttacttgcaatcaaagaattctaacacagctatggttctaattaattctaactaatagagctaatacactaataattctacctagtacagctatgtgtgctgagatgccctggggcactacgttgcattggcaggggtgctttgttatgtttgtcttttatttggttcaagttattttgttgtctttgaacagactgtgagagggatgggaaagactggtgcttggggtggccatctgacccctgatggacaggagaccaggacaagcccactggatgagccggaggggtccaggaggagggagttgagagctcctgctagggttgacacattctggtaaggagttcatctgctgtccaccaggtaggtggtgtgcaaatacaactaagcattcatgtttaaggtttttttttaattttttatttttcgaggcagagtctccattgcccaggctggagtgcaatggcgccatctcggctcactacaacccctgcctcccagattaaagtgcttatcctccctcagcctcctgagtagctggaattacagtcgtgcctccacgcccagctaatttttgtatttttagtagagacggggtttcaccatgttggccaggctggtctcaaactcctgacctcaggtgattcacccgccttggcctcccaaagtgctgggattacaggcatgaaccactgcgcccggacttatgtttaaggttatttaaaaagcaaagcaaaatcctaaccatgttgaatttttgaatctgcagcagattcaaattaatgaatttaaatcatatatcaggtaaaatactaccttgacatattttgtgatcatactgagagaaaattaatataaagctaattcaaaattttttaatttgtaaatcaaaagattaaaccttgttaaaatttacaaagaatatgccactataagaagaagtagctcaactttatttcagtaaaatcaccaacaaaacaataaaaagccaaaactaaaaagacagttttaattgtgagctgaagttttatatttctttacgaattccatttaaaaaagagaaatctctaaaatcatcaatacgcaggtctttaatccacttttaagtctttccccaccagcattgcagtcacgggatgcatgcttgctttgtgctcttggtaggttcggacagcttgatcatgggatttgtcaaaggcagcaagatccctgccaaaaaagaaaaaattgaaaagaaagaaaggcgagaaggagacagaggaggagaaagggagggagagaagaaagaaaggagggaaggggttcagaggaaaggaaaaaggaaggagaaagagaataagaacacaagtcaatacccaagattaaattaaaggatgtcagcaggggtgacagccagcatcacccaaataaggcaccagtcccagccaatcagatgggtatggtcctgccacagggtcccagagacctccttctgtaccagagactggcctttatactggcagatcagacattttgcagcaagttacagggaagggctagagtggctgggacccgtggctatttaccaagcagcatggaaggattttattatttgaacagagtcctctcatctcctggctaaatatcagccctgtatgtgagagtgagcctcaaagcctttctttttaaaaactgcttttaaaaaaaattttttaatcaagattttaagagtatgaaaacactaaaatttatatagaatttctgaaaacttcaaataattgagaataaaagtcctgaccacagtgaaataataaatacataataaataatacacgaaataaataataaatacactaaataaaaaggacctaccatacaaaaggtaggattagtcatttttaatgtaactactataaacatcataaaacagaaatacttatttttcccacaaaaggtatactcttatttattttattcattttttttttttgagacagagtctcgcactgtcacccgggctggaggagctggagagcaatggcgcaatctcagctcactgcaacctctgcctcccgggttcaagcgattctcctgcctcagcctcccaagtagctaggattacaggtgcctaccaccacacctggctaattttttgtatttttagtacagacagggtttcactatgttagccaggctggtctcaaactcctgacctcgtgatctgcctgccttggcctcccaaagtgctgggattacaggcgtgagccaccgcgcccggcccaagtatactcttatttaaaaacctatttaaagtatactttactcaattcaaagctagatgggttttaattagggaaagcatataaaatatacttaaaacttaattttgtggtcacatcaaaaaagagataatgacttattttgccaagttttatgatattatatggccatcacttttgatggccaaaactgcaattacttttgcacccacctaaatacttgtgaagtaaatgaaaagcaaacaaaagtaatcatggatatttatggcatgatttttttttccagaatttggacaaaattcataaagaccttgactgagatattcttgtatcttgctgtcaagatacaacttatccccctctcactaagcattcctttattatgtcaagcaacctacccttgacctctatgcaacatttgaacacaaaagagttagctttatctgcttatttctccttacatttaacttcagactctctttcttgtctatacctacccaccaattatcttctagttacctttaaaaatctttgtgtatataaggctatctttgatttatttctattttatcagtatctaactctatttgatccaaaatagtaatccatatataatgcttctaaaaagaggaatgaaattatttcacattttaaatatttataagtgtgaatccctattccaaaattatactgataaactttaacaaattaaaaaatattgtcatatagattacgtttaaatatttgacagttttcttcctgtttcttagatgaattcaaagtacggtctgagtgggttcttacttgaataagggccgggtaaacttcattcttccttgttcagttgccatctttagcgccaaaggaattgcgtcctcccacttggattgaatgcagagccgcagccatctaaaaggaggatttggggggagcatggagtagaaaatgaggaaggggcaggatatgacaggtatatcttaatattacttctgtagtgatatgaataaccccactatagttatactgtacaccactttatggtatgtcttgattctgagactctcaaatccttatatatacaatttaataattggtgaagagaaagaagaggagctggttcttgaaaaagatcatatatttttaaaggtctggatcaggtaggtgctcacataccttataaatccaatttctgaaggaattaaactttggtttaagcctcacattacaaatttgaattaagaaagatcaggtaggtgctcacataccttatacatgcaatttctgaaggaattaaactttggtttaagcctcacattacaaatttgaattaagaaagattaacatataatagaataaaatatttctaactattcccatttcaaagtagatttagttggttgtggagaaagcctatttaccacggaatccttcattctaattttttttttttcttttaaggcaagagaggtttagagcaaagtctaacaaaaagattaatactaccagattacatattgcaactattccttaaataccactataagtatttatatagaagcagtcagtttgacaaggaattctcaagactcaagtatgtctcatactctgcattccctttctccatctttcaaaggagtttagttttctgctttcttccacagagacaagttaaaatgatgtacctgaatcgtatttcagaattgttaatggcattgaagttgtacacctcttgcattcgctttatgtgccccaatggaagaggtgcctaagagcaaaataaagaagtataccgtatcatttcaacaggattccttggaagaaaggagctggagagaaatgcatagccagattaaaatcctaaatattttataatatagaaataagtcagataaaaataaaagaaacaaattgcacactaagtaaattctgtgcaaacttattccagatgaggatattctactgggagcacagggataatttactttgtgaagtattcagcattaaatgagaattgctcttcttagactttttagcatgtataaatattatctttcagacttttcctagagtttttctagttattctctataacttatatatcttaaatgcaattccattctccagatgaaatcatagttccttaatttttgcctgattccccctagctttatctttgtatatttcctctgaaatccctgttaaattatctgcatacctacataatagcagttcttaaatgtttgtattatagatctctttgggaatctgatgaataatgtggactctttccctagggggaaaatacacttactacatgaatacaaacttctgtatacaatttcagggggtttataagcatcctatccctaccttaactcaccctaaaagggaggacaagtttgggtgaaggaaagaaaaaagatgagttcagtttggacaagcagagagtttgtagtgcctgtgagaggcagaggtgcctctaggtagatgataactctcccctccaaccacgacctccttaccttacaggactccacactcactaaccaatctctgctttcatgaactactaatcctgtcgctaataatttagtccattagccccttatggacacatgcaactccaagtctaccctggtagaccaactggttaaggtcatctccaaggctccctgacttgccctaagttttgctatacccattccagaatcaccctaccatgttctctctctctgtggccctagaccacccaccagtggtagagcaatttatgaaaccatgatgacccgatgcactaaaaatagattctctctttgatgggtcctttgttgcgtcaaaatcctattcctaatttttgcatcaattccacagaaaattccgctccaaatcttctttcttctcaaggtccttagactgaagacttccctttcatggaagtctttaaaatccagtcattggtttatctcaaaatgcagcaactcctttcggtttcatctattctttcaattgcctagattcgaaaccttaaaatctgcttggattctttactgtcaacccctatagccagtcagtcacagagctctgtgctttcaccctgtgtaaactctttctcacgtcctgttctctcctctccccgcaacttactccctcaagtccggtactcctgccagtctcccaactagtaacttcaccaccatgcaaccttcatggccccagattagttttctacaacccagcatttcatcccgactcttctgctggatttttaaaatcttttcctactgatcagtgtaagatctaaaatttcttagcttagcattgagagtcatcacatctggtcctaccagcttttctagtgttaccttcactgacttccttacccagtgctactgtttactccagcaatgctgcagacgaattccagcccttgctgctccctccaccttcaatttctacctccctgctagccctgggggtgcaaagcaagtctcctccaaaattccctctctgatgcccccagttggaagagtctttcactaattaagtttttccaaatgatacctaaagtatgcctccttttattgctaatgtttttaaaaaaatttttttatgagatggagtttcactctgttgctcaggctggagtacaggggtgtgatctcggctcactgcaacctccgcctcccagtccaagtgattctcctgcctcagcctcctgagtagctgggattacaggcacctgccaccatgcccggctaatttttatatttttagtagagacgagatttcatcatgttggccaggctggtctcgaactcctgacttcaagtgatctgcttgcctcggcctcccaaagtgctgggattacagatgtgagccaccgtgcctggcttattgctaaattttgcatgtgttccccttcctactagattatacgctatttgaagataaggtatatcctttcttacatattttcatatttagcacaatataaaacacagtaagcattcaatgcttttttaaagaaatgaataaattttataaatgattttttccccattagtttccacattaataatcttttgccaagttgggtagaacataaatgctgtgcctttctgtccattttaatttctaagattttgagctagtacttaccctctggagcgtctgtgctaaaaactcattcaattgatgagaagagagatccttcaggtctgtggcattgaatgaatttaaatcatcttctttggcctgaaataaatgttacctagttatttttgttcaagtacaatttaataatacttattggtttatctgacataaaagtaaaaattgagaaaaagaaccatatgaatgaacaagattattcaaaataaatttaagcctgagttacttaaataatcctgagattgagttactgtaatttaaatagctgatatgactcctagaatctatattacttaagaaaaagtagattatgggtaggaagagtggaagaaactgttgacattcattgtaccattcgaggtatagaaatttccaaagcaaagaaacatttcaaaatgtatgcatgtcaactaatctatagaccaattcaaaaaggtaaagaatgaaatcgtatatttttaaatattacattaataaattggtaaggccataaactaatgttttcctccatccccacatattctgttttccccacttaatcttagaaaccatctaagaaaaataaaaatgagtctgcacttttcaaatttggatttactctcaaaaatctttgagaagatgattaagcaatattaaataaagcttataaaaataaggatttttaaatcttttagaactacttttataatcttttaaactagggcttttgttactttaaaagaaatatatgcaaatactaaaaaatcaaataggacagaaggaaaaattcttttggatctgctccctgtctccaagtactactcctcagtaactaatattagtagtttctgtatatccttccactaaatttaatgcataggtatatacccttttaaataaatattttgcatcttccccctcttcagaactctctttaatagcaatacttcttttccctttacaacttatccttaatatgagaacttacagctccagctcattttctgtgcaaaaacctgcaaatctaaactatatattaattaaggatatatttatgtggtaaaaacataaaaagcaagagaatgataaaccaaaattcaggacaatggtaacctggatgggtcagcaaggagggtggagaggggcataagatggggagggatgctacagaggtaccgctaagattttacttcttatgctagtggtgggtcacacaattgttttatacaccatatgaatatgttataaatattcttttgcatttatttactatttaagacaaatcattgagaaataaaatacataaggaaaagagtgcattagtgaatacagtgtcctgaatctgttcctaacaatgcctgtttctactaatattgaagagttgatcattatccaccttaactgctgggcccaaaggaatatttgagcagaaattagtagcagttttaactagcaccaaataagctggaatacatttttcaaactaaaacagagaattttaatacactcacactgttaaaaaatcctgtttcccatagaaatctcttatacttttcttcatgacaagtttgtcaactacacaaaacaggttttaaaaggcaatagctgaactgattgcacagctggaggccattatcctaagtgaattaacacaggaacagaaaaccaaatacagcatgttctcacaagtgagagctaaacgactgtatattcatggacataaaagtggcaacaatagatactgggcactactaggagtggggcaagggttgaaaaactactgggtactgtgctcagtacctgggtgatgggatcaatcataccccaaaccttagcatcacacaatatgcacgtgtaacaaacctgcacatgtgtcccctgaacttaaaagttgaaattacgtaaaaaaatgataaatctgttgcaaattaataggaataaaagtattcctaaatcttctgttatttttcattaaagaattatcaagggctcatccttactttggcttcagtaaagggttctattttagtacatatatgaagaagctcctctttaagaagcttcatagaaagtgaacaaagagcaaaagtgcttcgattctttgcaccactaatagtcagcagctggtcacccaagatcattttagatttacctggtatgtgaaattgccatattggaagcagtatcttataaatgatttaaaaggaaaagaagaaaggtaagatgcaaatatttttgcatactttttttttttaagagttaagaagcaagaaaaatcaggattaatgccttcaacatcaatttttccccccataaaacttaattttctaggctgggcacagtggctcatgcctgatgcctgtaattccagcactttgggaggctaaggtgggaggatcactggagaccaggagtttgagaccagcctgtacaacacagaccctgtttgtataaaaagttttaaattagccaggcatggaggcacatgcctgtagtcccagttactcgggaggctgaggtgggacaactgactgagcccaggaggttgaggctgcaatgagccatgatcacgccactgtagtccagcctgggcaacagagcaagaccctgtctcaaacccttaattttctatattgagagtagatataatatcaccttagataaacctgactttcaaatagcctttccaaatataactgtttgtgatttaaagtaccctccctgcttcatgagtaaagacatatttgcacaattcaaaaaggaatcaaaaatcacacattattacttacagtaatccatctttgacttaaggcaatacaagcatttgtcagagtcatatcataactgcaaagataaagattacattgtttaaaaatgcacgtgcttttgcagaaatgcagttttaaagctacagtacatacttaaatttcaaagtcccttttaaataaggaaaacaaactccaaagtgaggaaaataggaaatattttacctaacttacatactactggcatcatccaagaactcacaaacccaaatggataccacattaatgaaacacccatctatcttttagaaagaatgccaaagcacctcagcaaaagactgtcatgtgctcgagtagtatatgctaaagtagttggaatcagttgagcatatttagtacatggcaggaacagttctaggcactcaagacaacaagatgaacaacatcaagtccttgctgtcatggattttacttggttgttccaaacatctaatcatctaacaaacctgcaagcacctgctacataattggcaccgttctagatgctagacccttgagagagcccgataccattgcctgatgatttcattcctttttagaagaaaatgaaattaacacatggtaattgttaagcaaattataccaatatttgtgtgttctcaacttagaaatcatattttgcaacaatgggaaagaacatgtagtgtgtgcaaaattcttgcaaaacatccctctttctccgtaaatcatgcttgcttgtactgaaatgcttgtattagggaacagagaggcacctgccccttagagcctaaatgaagtaagttttgattagaagttaccactgaatctcccttaaagagagttgtgactgggactccgtttgttccctaggggagacaataaaaaggtcaacacagctcccacctcgaagcagctgccagtttattacatgaagtgtcaggctgtggactgcaggcatgccattttgtcttcaagaacaggtgggatcagaggtccttgactgatcagaatacactgctttcaaccaaaacattattagcattgatttcttaaaaaataatagcaaagtagaaaacctttagctggtctgtttcttcgtgtcctgaaacttccttattagtgtaattaaaagtactaagttaagaattagcctgggaaaggaccctacttatggcaaagtcttcagaaaagtaaagagcaaaaccagatatgtgccttgttctcatggtgctgacagtatagcgaagaggaaatactttaatcatacgaataaataaatgtaaagttagaactgtgcaactgctacgaagagaggatatagcactaaaaagccctagaatgggagatttgacctggccagggatgtcaagaaatgcttccaagaggaagtggttcttgagctgagattggaattaactgggcaaagggctccgggtagagaaaacagcatgctcaggtactatgttggaggacatatggggagttcgagaaactccaaaactgccagtgtgactgaagcaaagggagctagagtgttaggagcttataatccccactaaaggattttgtcttagcccaagagcaaagagataccagtggagactgctaagcaggaggacaacatgacacatttgtgcttttaaaggtttactctagctttagtgtggagagtggctgggagaagtcagaacagatacaagtgcacagtttgggtgccagaacagtcttccaggatgtgaagatgtgatactgaacttggacagtggtagtagaaatggagagatgtggatagactcagatatttaaatacatatacaaatgatgagagcattataaaaagaggatcgtggaagccaagattctgtgctgcaatggatcaaagtattttctgtggtttgagattttctaagatactctctctttacagaattcccgggcacacgaatgattccagggttcctccagcactttggtattacttgaaagcaatcttaagggatctagaatgaaccaacgcccaaaaaggatcccttagcagcggtgatatcaaagaaacacttttgaagaactaattttccacccagatttccccaattttaaaagcaatgggcaaagccttctccactcctaaacttcctggaactgtcttttggctatatcaggcccctgaagttagagtctttgaaagactccaaactccaaattctatgcttttattctcaggctcctcataattctacagcacaccagactgctgaccactctccgtaccacttttaaattatttcttcccacagctttcttaacaatgaacctttgaaatctttttagttttccatttattttgctacctttcctctgtcctagctctaaaatgaagatcctctaaggttctacagtttacttcttgtattctcctttgtaagtcatctccaagacgatgtccaaatccatcaccattaaaattaatagtttcctcacccacaacacttaatattttaaaaaaaatacttttcattgtattataattacttgatacatacatatttgctctgtgagttccttattcatcatattagtgcctgacaataaatgtgtgctggattgagctgaatctttattacatctctgctcagtcatttttaatttcttcttttctcaccacagccaatcagttgccaatagattctagcccccaaacgtctcttctctcagttactcctttcttttccactgcctttgtatgacttcaggtcctcataatctctagcaaggctgttgtaaaaattaacgagataatgtatggcacttcttaatgaagtgctaggaaaaaaatctaaagtattatttttgctgataccttttttagacgttaaaagggtttactgatgatttgtgccacctgtttccaacacaaaattcgaaacattctatcgtaatcacccctccctacctgagctcctgtttcccaccacagcctatgataaccaggactgcccagttagtggggcgctctgaccacatttgttccatactcagaactcccagtaacttctcaaccaaacacttctcggcctggctgtttaaagtgctttacaaacaaacatgaccaggcctcatcttgtttcttagcttctctcctgctgctccctgaacatcaattaaactggcctgtttagtgtaagagaagctggtaggcaattttggtgatccaaaagaaaggcaacaagagaacatgccatggaacatgccatggtcagtgtcctcacacaactcgtgaaagaccagggttcaggtccgattgaaggagggggttcagtataaaaagcagtatattgaggccgggcacggtggctcacgcctgtaatcccaacactctgggagacaaaggcaggtggattgtttgagctcaggagttcgagaccagcctgggcaatatggtgaaaccctgcctctagcaaaagtacaaaaacagccgggtgtggtagtgcgcatctgtggtcccagctacttgtaaggctgaggtaggaggatcacttgagcctggaaggcagagggtgcagtgagctaagatcacatcactgcacgccaggctgagccacagagtgagaccctgtttctaaaaaaaaagaaggaagaaagcagtatattggaggcaataagactgccagggtttgaatctcaacttttactactcactagctgtgcaacctagggcaagacactttacctagctaaacctaacttacctccttgggaaatggggataataacttataacagtgttgtaattaacataatacttataaaatatttttattgcagaagtttgaaggaagatacaatagcttattgtctaaatccctcaccatccttgtgcagaaaggaggcactcaattacttgaagtgaaaaaccatatttgtaaactgcagaaattattcttttggcctcagggttaaggccaaaacacctaagaactctgctttcatcatttactagtaacagtttcaggaaggcatactattctttcagatattttgaggctctctaggagttaggagaatgagaaggaaagcattagcaggcaagtacttacttgggctttatgggaggcagtccaggagagtagagccaggcattccaatcaacttgattgagaacatcaacctatgaatagtaagaattcacagtttacaatagaatgccctttcctgtcaaaaaaaaatttaaacttgtaagtccttagatatataattttgtctaatctgctatatcaagataatttctaaatcttttttaaaaattaatattttaaattgatagatcataattgtgtatacttatgtgacacaatgcgatgttttgatatatgtactcaatgtggactaagtcaagctaatatatccattacctcatctaactctatcttctaaaatttatattcatcaccatactattgatgacttctctgaaataggaaaattctacaggtagttcatgtggttaagatcacatttaaaatagaaaaaatatgcaatgagaggttgagtcctaaagttctgaaccaatactactattagataatacaagttaacctaatcagtcaataaatagagatatatcgagcatgaaaaatagaaaaggtttttaaatccaaccttatctttaaaataggaatacaggaaatccttccagtcatcagtagttatgctcttataggaaaacttctcaacataagcttttaagaatcctaggaaaatctctaagagtaaaaaagaaaagaaatcaattcatagaaaggtaattatttgacattttgtgtgcgtgtttggcattgtactattaaccacagagaacagagaacattcagagaatagggaaatctacgaggactttcagagtgaaagaatgttcaaaaaaggaggtgggacttaagttgggccttgaagaatatatgtaattcagtggaagggagaagagaaattctaattataggtaaggggataacacatgaagacacagaaaaggaatgcataacccaagttctaaaagcaataaccttcacatgactagaaaggagaaaaataagactggacaggcagaatggatccaggtgacagacagccttccaagtcaatcaaccaaggagaacacctcaatgtccatcagtgggggatgggtacataactcagcatagctttatcatgaactagtatgatggcattaaaaagtatgaaacagatttatatgtactgacacagaagggtgtatgtgaaatatcgagcaaaacaaaacacaaatgcagagccaatatatagcatgacccattttttgtaattaaaataattacatgtatttatttgtctgcttgttaatttacacctagaaaatgatctggagccatttacaccaaactgctaacagtggttacccctggggagtggaaaggggttgatggactctcacttgttactcttataaacttctgtaccatagaaatgttttcagggaatacacactattatcctaatttcaaaaactgatgagattttttaaaaaatgaagcagcataatttaaaccttaggggttattaatggttttaagttgagaggtaactcagaaaacaatacagatttcttcagcagctacatccagaatgaattggaagtattaaatggaacaaaacaatagtttacaattcttcctaattctcacattaccctcaaaaagaaaaaaaaaatcataaaataccaactacttacctggtcctccaagcagttgttcaaggtaaaaaagtaaagcaaagcccttctcatagggaactgaagaataagctacatcagggtctatatctgtcagatcaaccacaagtttggtgaaaggatgtgtctccccaaatgtctttacctgcaagacatgaaataacatggagaaacatatagaaagactgctatcaccacgcaaataagctaataaggaggtattacttcactcagtggtgtaactttaggggaatctaaaacttggagactggaacactaggatatgttggcataaacttctggaagtctattaatagaatgcttacttaagtaatattctctgttgtttcttgctcaataatacaggctttattcttataaaaagactagaaaaatgatttaatgcctggtcagcaaatttggctttcaggagacaacacttaaaaatgacataccaaataagatgcaaacatagtaaacagctatattaatagcaaagacccagtgaggtcccacagctccctatttagaccaggtcatcaaaactaccttacatagaacagtgaacagtgtggatcaacacagtgttataccagcattgacttcactttccacacttgtaaaaatgactttttggttgctacacagtaaagacgcttttataaaaactcagtttttaacacctatacaactttggatgaaggtttttaaaactttgactcctttaccgaattctgtagttctccccatcctcccagagcattaaaatgtctgaacttttcaccaaacaatcgtccgcaaatgtggcgttccaagtacacagtatgtccctcatttaacctgaaaaaaaaatattttaataaaaacacggacacagctgagaagaaaagacatttcaatcaagatattttctttttggcttttctacagaggaaagcagttgtaaggcatgaccactacagtctaagccgactctggctcccaggcagtcaatccagagcaatgggaagcccagcccagcagatggcagcagggaaagttaagccctgcttctgctcttgcatgtccctatgttaaaagtgggagtatatcaggaattaaacttaacacctagactgaacctaacactcctaacgctgtaataagtgttacagaatttttaagaactatccttgttggccgggcatggtggcccacgcctgtaatcctagcactttgggaggccgaggcgggagaattatctgaggtcaggagttcaagaccagcctggccaacatggtgaaaccccgtctctactaaaaatacaaaaatgagctgagcatggtggcgtgcacctgtagtcccagatactcgggaggctaaggcacaagaattgcttgaactgagaggcagagagatcacactactgcacaccagcctgggcgacagagtgagactccatctcaaaaaaaaaaaaaaaaaaaaaatccttgttggctgggcgtggcggcttatgcctataatctcagcactttgggaggccgaggtgggcggatcacttgagctcaggagtttgagaccagtctgggcgacatggtgaaatcccatctctataaaaaatacaaaaattagccaggcatagtggcatgcgcctttagtctcagccactttggaggctgaggagggaggattgcaaccctggagttgcagttagcagagattgcaccactgcactacagcctgggccacagagtgagaccttgtctccaattaaaaaaaaaaaatagctgggcatggtggctcacacctgtaatcctagcactttgggaggccaaggtgggtggattgcctgagctcaggagttcgagaccagcctgggcaacacggtgaaaccccatctctactaaaatacaaaaaattagctgggcgtggtggcgcatgcctgtaatcccagctactcgggaggctgagacagaagaatcacttgaacctgggaggcagagcttgcagtgagctagatcgcaccactgcactctagcctgagtgacagagtgagactccatgtcaaaaaaaaaaaaaatccttgcctacctaagagatgataacaaagaaaaacaagagatacacacaaaacaattcagagtggtaggaggcagggaaaaaaaaatcagcaacatgaaccaataaagaaataataacaaaaatcttaccaaaagtgatcccaagttttgttggtcactagattccctgtccagctatgagatatttcatgtgcaatgacctaaagaaaacagtgtgattaatagtaagactgattatcttaacctaaaataacccattctactgtaaacactccatgttattcaatttttaaaaaatattagctgagatattcagggagttactcagttcagcaaaatctttaatttaaccaaagacatacacacacacacaaatatggcataaagtaattagaaaacaaaaattacttagaaaatattaaatagatatatcactgcattaaaaatatttcataaatatatgaagagatcaaaccataaaatttccttaaatctattacatctaattgttaataatgtgagaagagtccccaaattgtccattataaccatatctttaacataaaaatacaagggatattttaaaatcagttgacgtaatacttcttgaaggtaaggccataatgaaaaagtttaacttacattggagagtgacttgtcgcctgcctacaaaaaaagaaaattaccttagtattttagtaatcgaattacagactatctaaaagactgcctacctaaatacttagcatactggcactggtgatccactgtatttctactacagcacttcaaagaaggtaaaagagaccttaattgaaaaaacaaaaaaaatacagaactaaaaattagcatcattctttcttgccctaattctagggaatttttgcaatacaatgaaagccagtctatttgtgtctaacttccatgaaacatttcttctacttccatttttatatctgctcttatttacccatcactttctttctctcctattacccaaaatatatttaataaaactttagagtgtcctatgtgtcctgtgctgtattttatttattttattgctaatccatcactcattttggttctaagaagaatttaaagtagctcacaggcatattaaacatagcagcgttctatggccctaatcctttcctgtacatggtgtactgattttttttttaattgtacctacacaccaagtgtaattggtatagtctgattgtctggatacataatttatcaatgaattgttgttacacagcacccccatgcccaactccccaaataccgtgaacataatattctccttctccaaatggcctgattattttcctttcaaaaacaagatggaggcctggtggggtggttcatgcctgtaatcccagcactttgggaggccaaggcaggtggatcacgaggtcagaggatcgagactaccctggccaatatagtgaaaccccatctctactaaaattacaaaaattagctgggcatggtggtgtgcacctatagtcccagctactcaagaggctgaggcaggagaatcgcttgaacccgggggcagaggttgcagtgagctgagattgtgccactgcactccaacctgggcaacagagcaagcctgtgtctcaaaaaacaacaaaaaaaaaatgagattgtgataaccacaataaacaataaaattagaaacaaaggttacacgaacaagagaaaagatttttatacatatatacattattaggactctaaggttctttacatatatatacatattattaggactcctaaggttcttaagtttatttttgaaacgtcaatttcaaatgaagaaacatttacacttaccagtagagtaggagttacaaaagtaaggcaaggattctccatgccaccataagggaaggatggtggcaggaccaataggtcatactgtccccatacatacggtcctcccagatcttctgctattttaagcatagattcagtctgaaaaatcaacatatatatgtctgtatgccttaattatcaccattgtacatttcttaaaattgtatattgctttctatgaaggttacaagttaatgatttttatgttaaatgaaaatgataaaaagaatgtagcaactacacatctacataaaagacaatctggttctttccccgtatcacttaaaaccatcacatttcacactcaaaatcttcaatctactgtctatcacaatgattacaaaggataactaaatgaccaacctcagaaaactcataagcagacttttccacctgctctttctcagaccacaccaaagttcttgggccaatttgcctgcaagattaaaaagcttaataaaaaagaaattcatggcaaatgattcatctggttctaaaaagtagttaatgtcttgtagacaaacctttacagtgagagtgcatttaccatgtgcctatgggaaagggatgaggttacatggcgtgagctgcaaacctgctgttgtatatgcagcaatagatatgcagctctctaaggaggtacaggctgggccaaaggaaaaaaaccaagacataaggtgtccccaattagtttattgcctcttgtaagacctcttgagggtctcatttcatccctcaatttcacaactatagaaacccagtcacaactcataagaaactattttttttttttttttttttttttgagacggagtctcgctctgtcacccaggctggagtgcagtggcacgatcttggctcactgcaagctccacctcccaggttcacaccattctcctgcctcagcctccctagtagctgggactacaggtgcccgccaccacgcccagctaattttttcttttttttgtatttttagtagagacagggtttcactgtgttagccaggatggtctcaattccctgacctcatgatccgcctgcctcggccacccaaattgctgggattacaggcgtgagccaccacgcccagcgttttttttttttttttttttaaatatacagggtctcattctgttgcccaggctgagtacagaggggccatcacagctcactgcagcctccacctcctgggctcaagcaatactcccacctcagccttctgagtagctgggactacaggcatacactaccatgcccgattaattttttatttttttgtagagacatgatctcacttatgttgcccggcctggtcttgaactcctgggctcaagcgatcctcccactttggcctcccaaagtgacgggattacaggcatgagccacagagcccagcctgtaagactattctagaacaggaatgggtataaactttgtcatgcacttaaaggttgaatactcttatataagaagaaacaaatagaaaatgaaggaaatcctgtcagatgctataacgtggataaaccttaagggcattatgacaccttgaatgaaataagccagacacaaagagataaaatcatactgtatgattctacttatgtgaggtatctaaagtaatcaaattcataggaacagaaaatagaatgggtgttaccaaggactgggcggtgggggaaagaggagctattgtttaattggtgcagagtttcagttctgcaaaatgaaaaatttctgaagatctgtttcacaacaatgtggatatacttaacactactgaaccgcacacttaaaaacagttaagtgtgcttaaaactaagaatgaacaaaaaattaagaaggaagggcactttatttgtaaaatattgataaaatatcttacatttctgtaatatttgtaggcttccaagttctttaatatattttatctcatttgtttcacataaccaccctatgaggtagaaagtcagacattataatttcaaggataaggaaacagagattgagagtgacttgttcaagcttacatgagaatccagatctctaaaggtaagagcatgctcattttacaatacttgaaaaaataaggggtaactggtcaagatttttaaatgtaaaattaatttgttgcctacattttagatttgaatttttctagagctgtcagcttgatatcttgagaaatatgcaaatgattgaccaattaaccttgagagaagttcaagatgcctaagttttgatctttccacaaacctgaaaatttttccaaaagctcacctgctttctaaagctccaacaactaaagcaatcaggtagcagggtattggaacctaaagagggcaaacaaacgcacaccacgtgcttgcattagtgttcacaaatgttacacagtaagacaattcatatttaaaagtaagtaaattccctttcaaatctcctaatattagtagggataactttgcttttatacttctcaaatagttctcatctttaacatatagcttaaaattgtgatataaaacattgttcaaaacatctatttgccttttattctgctaggaacaaaagcttctcacacatgaaaaacaagatcacacatactattaaaaggtgcattttgagcatttctcaaaaagtaacctacaggaagcgcatttcccatatgtttgcctttttcctcctgacttttaaaaggttttggttttctttttttattcctttatgtttcaaagcactattggcatgttgtagaggcacacagagttacccggcaataagtagatgccaaagttatgggagcttggaaccacagaagctgcagtggaagtcaaattatccattgtgaggtcaattaagaaaacacacacacacacacacacacacacacacacacactcacgcatgcatacacattctgttcactgaaggtcaaagatacatgtctaatgaccaggactgtaactgagtgcttttttggtcttgactcctccatttgtaaacactctcaacagccacttgcccacactgtagtaccagggcaggtgaatgcgtaagaactcaaaagaacaggaagccagcccctgaactggagtgagggaaaatgaaaacaggtatgctccctattctgtctctacagcaaaccctctcttcaatacaacactctgtaagtagaacaaaaccctttaaaagcacaaaagaaaaaaaaatgaagaaaacaaaaaccaaaagctgttctcaaaattctgaaatatttcaaaagtaattttgccctctggatgtgtacaagctaactgtagtttaccgccaatgaaaacaaaaatctagaccctaggatcttactttttggatgaatttgtatattttcctgcttgggtcttctgggtcaggtgtttctccatcacgaatagcactcataagtgccaccagttctttagggacagacacctaatcaaggagaaaaatcatttctagtcataaataaaagcttctatgtgtcttaaaccatatatgtaaaataaccttttcttcccattcttgactatctaataaacagactatgaacacaaaaagtatatacatatacaaaaagtatatatatacacacacatatatatgaacacaacgtgtatagatgtgtatatatatgcacacatatatatgtgtatatatataaaacacatatacaaaaagtatatatatacacatatacatatcagttttgtaaataaaattagcaatatgggaaactggcttctttaaaagtgaatgtgaaatttctatccattcacccatgcacattaagagcagagttttggtagaaactggattaaaatcccagctctgccacctaataactaactgcacaaacttgggcaaataaatataacccccgagcctcagtttccccatcaagtaagtgtaaaacttcaaaggcttgctgcaaggaataaataatataagtgaagagcccagcaccatccctggcaatggcagccaccatccctgctcccgctacactcacaaaacagattcaaaaggacgttatatactcactgtaggacagaatggttttgaacaattttgttttgaaaacacacacttggagttacaaatagaggaacattttaaaagtagtaactgtgaaaaactaaaatttattgctaaaaactgtcaaataattttctctggaaatccatacggaaaagacccttatgcggcaaaccatatagtcatttaactgtgtatcctagctccatgattctgaaagtttgatttctgatgaatgccagaataaaggactcccccaagtattaatgatcaaacaagaatatattccagtaggggctagactttcatgttcttcttgcatggctcaggacccaaagctgtgactgaggcaggcacagaattagaagttcctgaaccagtgctacaacaattgtagattctaaagcacaaaactattcaggaaataattcggttcagccacctcccttcatttaggtggtgatacgttatatatatgtgccagctgaggttgcgaggtcataaaacttgttcaagtgtcacatcattatttatttatttttttagaaatggggtctcgctatgtcgcccaggctggccttgaacttctgagttcaagtgatcttcccacctcagcctcccaagtagttgggacttcacgcagttattaagtggtggagaagagccagagccctgggattctttgcctccaagtataatatatcactgcactatcctagatgtaatttggttgtgggatgatttgggaagcaagaaggccccataaatatgggttggtcctcattctatttgcttggtctaagtaggtctagcctccgggatagtgattatttagtaattacagtccgccttttccaaaaaggattagcagtacctaccaagggaataagttggaattgcatacagacaagtctggaatatatgcccactaggcttatatggctacagaatgcatttatagaaacttaaatcatgcaaatgtcaatttttaaaagttaagtaaaaattgttcctaagttcttatttctagatccaggattctgaatttcttctttttgtttgtttgtttttttgttttttgggttttttttttgagacggagtctggctctgtcgcccaggctggagtgcagtggtgccatctcagctcactccaagctctgcctcctgggttcatgccattctcctgcctcagcctgccgagtagctgggactacaggtgcccgccaccatgcccggctaattttttgtgttttttttagtacagatggggtttcaccatgttagccaggatggtctcgatctcctgacctcgtgatccacccatctcggcctcccaaagtgctgggattacaggtgtgagccaccacacctagccctgaattcctttttaaaagtcagattggtttccatttcctttttttcacagttaaaatgtttaaaactgcctttaaagtagagattcagaatgagtgccacagcctctttgtttacatatttcaggtagaatttcattaagaaaaataattctagctctaggaattcaattatcatctctgcttatcatttataccatatttactgatatgcatcatttaattgagttaataattcgtaatatttacctctgcagtataggttaatttcacagaaggagtgtcctgacaaggaaggattgctctgcagtggatggcctgaaaaagggagaaacaagaagaaatagctatttatctttcgcataagtcattaagaaatcattaaaaattgcagcattgttcttagacattaaaataaaaacagtcctcatttcttgggattttttttttttttttgagacggagtttcactcttgttgcccaggctggagttcaatggcatgatcttggctcactgcaacctccacctcccgggttcaagcaattctcctgcctcaacctcccgagtagctgggattacaggcatgtaccaccacgcccagctaattttgtattttgagtagagatggggtttctccatgttgatcaggctggtctcgaactcccaacttcaggtgatctgcccacctcggcctcccaaagtgcagggattacaggcgtgagccaccacgcctggccttttgggatcttttaaagtccaaaaatagattcttggacttttaaaaatcagattttccattttaatctatggttaaccctcacatttcagttgaagcatggagaaactcttaagcagtgtttcctactctatggtctgggtgacagtagtgcccagtgagaagcttttagaaacctgagaaaaaagggctctgtagcaaaacagacctgagaagtatggcatactgcaccactgtcttgcagagccactagaatattagccgcctgaaggctctgaacagacctacaataaagaaacctgtttgatttcttacatttatgttaacacaaaacccatttctctctggtttaacacctaatgggatgtcagtattctaatgaacacagcctgagaaatgttgctgtaatcctgacacttcaatcttgcagcaaaccttgtaagtaaaacaaagaagcaaagaagggagaaagaacagtctctttcaataccatctagacatattcattcatatcatatgcaaagtgtttctgtactgccacaccaatcgttattaacattggttccatccagtatgaccacaggccaggtgccgtggctcactcctgcaatcccagcactttgggaggctcagatgagaggattgcttgagctctagaatttgagaccagcctgggcaacatagtgagaccttacctctacacaaaaaaaattagctgggcatggtggtgcacacctgtagtcccagctactcaggaggctgaggtaaaaggatcgcttgagcccaggagttctaggctgcagtgacccaagttcgcaccattgcactacagcctgggcaacacagcaagaccctgtctccaaaaaaaaaaaaaaaagagcacctacaatcttatacccggtctgtttacaaataagtctgtctactgctggtgaacaatgaaatgaaaacccagcctcattgagacagtctactaaactcaaaggaattctgatattaacacccttctctgaagctattacaaatcctaaacatacttcattccaccacaagctttcttaaaacccccaaactccaggtcttttcatttcagttctagaaaattctccaaagatataggctcccaaatgacctctagatggattaagtaggactagcagagccacctggttctctctcccaaaatagatttccaagaccatgcctctatagttccttaatggtttctagttaggtgacatggcaacaccaaaggggtttttaaatgtatttcattggataaggccaaacccaggcaaatatgcatacagaacaaccgtaagcaaattcatcaaacaaaatcatgtctacatgattcctatcacctcaatcatttattaatttagctgaaatctgtttcccatattcccaccattgctgccaataagaaatggaataatatattcaaaattaacattttcatgactcataaatcttgcatttcttgccaactttggttaatagacattctattaagacatactgcctgaaaatcagatatttatgagatacagattgtgcaatttgtacactcttgcgtagaacatttcatctcttctagattattaaactgagggtttcttagattaaaaagatgtttcaagtggccatagaaagtaaacaggtctgattcatatgctaattccttttttaaatggacttgtattgaaatttgaacctaacacacaggaatattgggagggatgaaacatgtaaagaatctagcacaatgcctggaaatagagcaaacgtttaatgaagtcagttcccttaattgtaaattatttgattactatgaaaagtaggtattttttctttcagaagacagtttgaaatgtattatccttgtgacaggttatctctaattgtatggctctttacccttagttttaaaacagaaaacaaaagtagtttaagtcatgcaattttaaaggtacagttaatatattgatataatacatacttttgtaaatgtgtaagaaaaatatggaaaagctacattccaaactcaatggtggttacctctgggcaatggtgtctggaaaaggtttggaaattaaatctttcactttccatttctttactattagcatttttcataaccagtacatattatttattaatttttcctttcattttatgactatttactgagtacctactctctgctaagttctaagtcaggcctagagagtccaatctaggtggacatatttccaaactgaaagaagcttcttatttaaagtaaggcatgagtgtattaatagtgaaagataaaatgaaaatatataattcatcttatatgtttctataagatcaattaatacattttattaggtaaaacctacataatccataaaaccactgttcattttgcttcattcaaccataggtgctgaaattttctgcatcagaaatcattctggaatcctttttacctggcactgactaaagagatatgggtgttccttcccagaagtctgttcaggagtgagccactggagagcagaagattttggagaggtctcaaaagaaatttctataacaatttcttgatttctgtatgaaacacataaatatattagtagagtatgattccatctagtgaaaatttaaactcataatacatacactgaataatataaataacatagtatgcattctcatcactgattggcagtaagctctaggtatgccacatcctcagtgggtaagtctcctctcagttttcctacctaattgccagcctgtgggtccttttacctctcccatgctaactgctagcgaaggcttaatggcaactaacagtggttgactaccccgttgtgtgtcacgtactttgcatctgtgatatcatttaatattttattagagtgaaaaagtaaaagaaatcatttttggggcttcaactaccacagcagcaggtgccacagcatgacacagagcagtgctagtctgcaaactgttaccggcccaggacaagacaagaccagaagttgagagtcagcattgcaaaacttttagagtcatttttgtctgttgaatctaataataaaaaatgtgtgcttgtatttcatctcttcttcctcatatttcatttttattgcattgtacaaaagtatcagtctatgacagattgaagaggatagaaattggtcctttaccccagagagtttgagaagcactgataataaggaaacagcagaggtttagagaccagcagccctgctggtgttcgaatcctgactctatcacttactggtactgtaaacttggggaaattatttgacctccctatgccacagtttccttgtagaatggggtgaataccatctacctcacaagctagacttaagtgtttcccttctcttaaagggaaagagaaggcatgaaaacactggcctctgaacaactggggtagatcacccttgttctaggccaatagttttcaccctctttcccctcaagaggtggcatatactcccagtgtgacaattctggttgccactttcttgaataagttatttctctaaggttccctttcctcatctttaagtgtagattataccagcagggttactgtaaggattagatacaagaatgcatttaaagcacttatcccaagattgctgcactgtaacagttctatctttggcattatcattgtcccattaataaatgcagctggcctctggggcaagggcaaggagggtgcaacttgtaaagctgcccaggttatcttgaaatgccttcttatgatggcatgcccccaccatcactctagatattagtaaaaggatgaatcgtttagaaactaacagttcccaaagtccttgttgtattatatacaaacaacatttttagtatcttaagtatatataattttaactgctgtatcaactttaatctgaacagaagatcaggataagtagtgtaccaatcattacatatttacaaactaaaatttaaaaagaaaaaatatttaaattagttaagaatatgtttccccattatttagctgtaaaagagaaagatcataacattcatacttgctcaaagcgataggaagagagatttccattggcgatcccttgtaactttgtctttctccaagagcatatttgacttcttgtccattgatcactactttttctattgtaaggtcctttgtatccaaaacctaaaattaatatttttaaatagtaagaaaatagtttcatttaccagaaaaaactcatattagatataggctacaacaactagttgcttatggagagtaaaatacagagtgaaattagaagaattgaagagtcaaaagctagtctaggtctcattttttgggactctaagcatcttgaaaatttttgggttctaagatttgcatatatattgttaaataaccctaggacagtcacacaaattttgggctttaagtaaaagtcaaatctaaatcaaaatatgtttgcttctgactcctaaaattttctctattatgaaaaactttatctataacttaagtttctttcactctggctcctcaatacattacacaatatatttcctcctagaactcatgtactttcaaacttcatgttcgttaagcaaatcagcaaactgtatatcactgtggttgtatatctagaaaaagcccaacctggtatggtaactcagaccaaatgattctgcagaggattgggaggccatatctacttgccatggccaattaaggacaactgctttgggcatgaaggagtgacatcaagtgtcagagtattttctatccccaaaatcctgagccctacaaatcatactctttaattatctctcaactaatctcttgtcctagaatcttgaaccttcctatgccacaagactgtttcctaacaacataaacaaaattctacttgatggatctacccactaaatattctagttttcctccttccttccttaaactccaagggagtttttgactgctatgactactacttctacttcttcattaatcatcctccctttccccttcttccatctggcttcttgctattgaaagggcagcccccaccccgatcaacaaagtcttttctgtccaataaccttgacctctgtctactcacagcccttatggactatgtcatctggttaaaaccccttccttcacttctttgcctgtacgcatacatcataaatggttctctatttgtctaatgtttttttcctttcccctcctttattccaattcaaaaatatggatatgtcccaatgttccagccccggtcctttgattttcttgccatatccttcactccctagctcttactcatgcccacatcttcaattagtatctctgtgaagatgcctgccattctagttctacagttgtattccctccccaggacctcagtcgaatcgcctgctcaacatttccatgggacatagcaccacacattgaataggcttctaaaaattccaaaaatgatttttatactccctgaatcagatttctccccagatttcttgattctgttaaaagaactcttccagttacctaaggtttgatcccatttcccaaccccacacagccacttaaaagttgttctttcacaatgtcttcatacttttcctttctttccactactaacccaggtcaggccctggactggcagaactgctttctaccagatctccctacctctggcattatttttttccttttctgaaatctgacctggctacatgtgaggccaagaaccagccatttcccagctgcccctgggtactttcttttgggggtacctcatttgttatccttactctaaattagtagaagatacggtttatatcttatttaaaataatagggttactccttcatattctagtacctctctagtctcttcatagtctagtacctagttctgaatagctattcagaatagctaacttgttttaaaaacttgatttgagtatcttgtgtttataacacatgcttatatagatgaattaactgggtcatttcccagtggaacatattctgttttctatattggctaaactttccaaatctgttcagaatcagaagtgtcatagtgacaactattttttgtgaaacgttttgatatcccctgtgtctgttatagctcttggccctaccctttcctataatacttactgtactgcattataatgatttctttttccattagactaagggttctaaaacagagaatgttacttaggtctgtattcccagggtttagcactctgcctcaaaaacactaggtgtcaattaatgcatgaagcaggtcctagaccaagagaaaacaaaaaatgcaatgtttaagctgtattatctcaagtcctaagtctcaactatcatttgcaaactactttttaaaattccccttcaaatttcagcgatgttatttttaaaaaatagtcaaaaactgtaataagaaagaaaaataaagaaaactggattgttgacaagttggatttagtactttttaagaaacgtgttaagcatcaacagctctactaattataggatataatttatatgtttcacagtatcctctttgaacaataccctccatccccctaaaaagcagttgtacttctcagtagctggtcagttgacatggaataggtatctgattccttttttgcacaggctggtaggaagctccatgtcaaccctgtggcccacttcttttaaagtatagagggctttatgccatgggttttgtttctcctatccctattctctcttcctgcaaattatttaattatttttaatcttatactatatatgttgcttcaagcagtctcagtcctttctagaacaaagcagagtttttttaaaaaaagctttatgcctcattatgatgtctaaatttacattttctacttgctatgtgcagggatatgatgaaaaaaaataggtttatgtgtgaaacacaaagctaaaactaaaaaaccaccttgatttgattcccagttgagacatttacttagtgaaaacaagatggtttgcagtcagaattacctattgttaactgctggcttctgccttggccatggcactaaaacctcttgagccactaaccaaaagaacacctaaacatttctgaaggtttcagtgaaaagaaacaaatgtatgaaagttatcataaatttggaggatcaaacttcagtgtaaataacccaaaacttgaaaagaattttagaaagcttagaatttgtccgattaagtctccttcagcattcctcaacatcacaaactctaagaacggagaggaaaagaagacatgacgtctctcctgattccgcactggcactgggtcttcccatctcacctctgaaatacagctggcactattatcaatgtagcccatgttaagcttaggcactgttttctaattgaaatcatccattaatcaaacttttgaatgtcctctacatgccagacatagactatactaggaagctgagatacaaagagttatgaaacacagtctctacattcaagagtccacaatctagtggaggaaagaaacaagttaactttaaataaatactaattaactaattaataaggataagctcctggtctaaggcttttgtcataaataagcaaacaattataaacatgttattttgtaccataaattgccttccttgtataacatgtaacattattataattccaggctctaatttgctaaacagacatgccaaccagaaatcactattttaaaatcttacttttctctagatttggggaatgtaaaaacaatgagcagatttttagattgggacattcttttcaaaatttaaacatcctgactcttgcttacttatagaacagagataaagtttttattctacaaaagtgatgagaacacatggatacacagtggggaacacacactggggcttactggagggtggagggtaggagaagggaaaggatcaggaaaagtaactaatgggtactaggcttaatacctgggtgacaaaataatctgtacaacaaaccctcatgacacaagtttacctatgtaacaaacctgcacatttgaagtacacctgaacttcaaataataaattttttaagtttttattttacaaaacaaaggtaagtgtgaggtcacattaagcagcaaaaagctataaaaattttcattcttttacttttatcagcatagtttataatttaatttttttaaataaaggtgaagaacaagaactttccagttaactaagagctttgagtgggtttggggcttagtcaaggttttattatatcttaaaccaattggaatatttcttctgaaatatatgttgcagctaaagattcaaggaagaatttgctgttcatatattagaaaaacctctttaaatttcttccactagcgacctcggttttggtttgcaattattcacatctgaacacaagtgtcctgaattgcttaatttttaaatctctagtacttttgaatgtaggacgtataaactcatgttcaaatatggcagtctcacagtgtggtttttctttttttattattatactttaagttctggggtacatgtgcagaacgtgcaggtttgttacataagtatacacatgccatggtggtttgctgcacccatcaacccgtcagctacattaggtatttctcctaatgctatccctcccctaggcccctacccccaacaggccctggtgtgtgatgttcccctccctgtgtccatgtgttctcattgttcaactctcacttatgagtgagaacatgcggtgtttagttttgaaactgcattgaaataggacttcagccctgcccaggcaaagttgctactgcaattaaagatagcatggtacttcaagaagaccaaagtgcgatctgcaaggaaatagatgccttcctgcttataatatcttaattttctttcttatggtacttttgttgattacctatcagtacatagaggaatcgacctatttttcaaatcaatcagtttagcaaaatgttgagggatgaagagtaagaaagtaagtacttattagttcatattaatgaaatcaaaattcagatccttcctacacaagtaggaaaaagaggcctgaaagccaccaattcttatctgcccgatctgatctgattgcttattgatgtgctttagtagatttcaccatgctacactgtgtaaaatacacatgtagcatcctgccctggtgaagaagccgaatttggctgtcttttcatgaccctcttatttttaaaatgatcttctatgaaattcttcaggtgaaaggtaccttcagatgaaaggtataaaccaaatactattgggcaatttgagcaagaacattaaatataggttatgatacagataaaatcattgaataatattccatgaatctacaacctttcttcattccaatggttatagagtttgtagaagtatgtgttttctaagtgaaataactacttggctccttggaaccaactattaaaaaagcgtattgaatcatccttagaaaatttgaacgtcccatccgttcttaaattattagaagaaagttgataagattaaaaagtagaaaggaccctgaagagagagagctgcgcctagagttagcaagcagggactgttagtttcaaagtagggcggaaagaagaggcctgcccggccggggctggaaatcctaagaggcttgagaacgactagcagggagatccagggaactaggagggagacggatgggtggtgccctgcagacctgtggattgaaataagtgttcccgggaggcaaccgtgggatcagggatcgacaggacatgggatctgagacttgggtgagattgttgactgaggaaggtgcccagggggctgggaaaagtctggggcctgaagaagggggttctgggccgcaggccgaagcaatggggaggccatggagtaattagagccaggaactaaaattatgggggctactgcaaagatgacacctaagggctgggtgagttgagaggagtggacgaggcgctggatgtgcccagggacctcggagagaggatccaggcgaggggcggaggagacatacgtataagtgggggctgagggaagggatgcagaggcgtaagcggggttgagaaggggtgctgtgagagatctgggggctgaagtgcacaacatgagttggatggaggctacagaagagcagacggggacgtggggctaggcaggggccgcggcggggtgagccggagatccgggagcccgcaaggactagggtcgaggggcagggagcccgggagaggcgggcactgggcaggcgccccactgtaccaggctgcgcagattgtcctcctgagactggaccgtgagagcagcagtcccggtcagcgtccggcgagtaaagtcgacgctgcagcgcaggtgcaggtgcttggtccggcagacggaagccggagaggccaacgaacaggtatccactatctcgggcatggctctgggggatcacacagcacagcgacctacagcccaacgctcagctaccagactcgtcgatagagaacctgaggaggagggagagaggtaaagaagaggaggagggattcgcggtgcacgccgggaaaggaagtttcttaaagtcagacgagcgttgggggatgggtgaaggaactacaagttccatggtgccgcgcggcaagcgggcgcttggctacctgggagcgtgtgtgttagggatgttgagggggaccaagcgtgctcctggagctgaagaagaggaggggagtaggggcagttagaagggtggccgaagggaaatgatgagaatggagggggagataaaactgaacactaccattttggctctgttcaactttcgtggaagctgtggtggcaaacgtaagaaaatcaggttcattggtgtttgcatatagcgagggcggggcggagcaaaaacgtagaaaaggcctatcagaaggctttctttcgtgcggttcctcgttagtatagtggtgagtatccccgcctgtcacgcgggagaccggggttcgattccccgacggggaggcacagtaattgttttttgtttttagctgtaagtaattcaaggtttaaacagttgttttgtcagtttcagtgtttattatgtatatccccagaacctgcatctctcaaacggagaaagccaacattcccatcttagaaactaatgaatttctataaaagttatgcactggtcgcaatgggagtacagagctgggacatctagctcagctctggggcctttgtggcaggtgaaggaggattgaaggatgccttgcctttagggtggggcctcaaaattaaaactggaaaaattggaagaggctaggtttcgaaggaccttaaataggtggccttttaatcctgggtgcattaatgggggacccactgaagagttttcagcaggcgactgataaagcatggtcagactcatgttataaaatgcggtatcaaaaccattagcaggagatttaggaaactattaaaatggctcaatcagaagatgctgggggcctgacataggtaagtagtaagttaggatagagaggaaggaatgaatagaaggaatacttatataagtggattcacagattgagaggagacgaaggtggcccaggctttcggcttcagtggctggctagtcattaaccagaggtagtagtctatatgaagaggacagtatgttaggctgtacttgcattgctataaatacctgagactgggaagaaaaggggtttaattggtttacagttacgcaggctgtacaggaagcatagctccagtatgcttccaggtaggcctcaggaagcttacaatcatggcagaaggtgaagaaggggcaggcctctacatggcccgagcaagagcaagagattgcggggccggtgccacacacttaaacaatcagatcccacaagacactgtggcgaggacagcaccaggccatgagggctctgcccccgtgacccaaacacctcccaccaggccctacctccaacactggagattataattcaacatgagatttggtagggacatatattcaaactaaatcagacagatttaaggggaagatgctaaattcaattttggacatatgaaatttgagaacctatgggagtggaagtggagatgtccatgagtcacttggatatttaagtccacagctctggggaagtgccaggtagacatgaccacgtcacataacgtggtggatgaaattatgacagtgggtaagctcaacccaagaagagtgtgtaaagagaagggtaatgaaaacaggttggaagctgagagaacaccagaatttattgttttaaaaagggctagaggaagagaaacccatgaaataaaccagaaagagccaaccaacaatgccagatgcagtcccgaggaccaccgaagtaagaagtgaaaattctctagatttggcagtggggtgagaatggggaaggtggtgattttgttgactgtcgtgatttggttgaagatggaagccagagagtagtggattgagcaatgaagagaagagggaggtgaagcataaaccactgtcaagttgcttggccaatgtgagaagggaagataaaggggaagctagagaggaatgcagcattgagaaagctttttttttttttttttttgagacggagtctcgctctgtcgcctaggctggagtgcagtggcgcaatctcggctcacacaagctccgcctcccgggttcacaccgttctcctgcctgagcctccaaggactacaggcgcccgtcaccaagaccgactaattttttgtgtgtgtatttttagcagagacggggtttcaccgtgttagccaggatggtctgcatctcctgacctcgtgatccacccacctcggcctcccaaagtgctgggattacaggcgtgagccaccgcgcccggccgagaaagaatttttttaatgtttgctttttaaggcaagagaaaactttaacatgtttagatatacaggtgaaagggcttctggagaagaggaaagtttctgcagaaggatcgactcagaggcaaaaaggtagagaagaagaaagtaaagatttcagaggtgtgagggatagttgatgggtttagcatgctggtatggttcaattctctatcaaaagtgacgaaatttagctccagcaacaacaacaaaaaactgctatatttctggatatccttgtgttggcccctgcaagccaaaggaaaacaaaataaaaccaaaaaatcccaaactatgaaatctaataccttacacatgcataggtcctaattcatagggtgtaagaatttgtcatcaacatttgcattttcggatttttttggcaaatgtcctgttgcccaggctggatacagtggcatgatcatgggtaactgcacattcaacctcctggactcaagcgattctcgtgcctcagcctccaagtagctgggactacaggcgcccgccaccacgcctggctaatttttatatttttttagagatggggttttgtcatgttgcccaagctggtctcaaacttctgagctcaagggatccacctgccttggccttccaaagtgctgggattacaggtacgagccaccacacagagccgcaaacattttttgaggtcaccaaatctagggtgacaaatacaatagataacatagaattcatttagtcaaataatacacagtcaaatcatcttatttatctagtatggagaaaggatagtttgttttaataagaacgtcattatcatcatcttctattattgattaccaggaacccacagagtttatgccacttgtgtttaaataaaaatatccacacacaaccacaaataaattcctccattaatatattcatcaaaaaataaattacagtaggaattgttttctgagataccactcaccccaaatatagaatgtacaaaatttgcaatttacaagcaattggagtattattgatatccaatggggaattgagaatgcttcaaaaaatgaggctttccactgcatctataaaagaagggtaaggctgggcacagtggcccacaccggtaatcccagcactttgggaagctgaggcaagcagattgcttgagcccaggagtttgagttcagcctgggcaatgtggtgaatccctgtctctacaaataatagtaataataataataaaagaagggtaatatcagggtttagttaccaaaggagacttaaagatgaaaagatgatctatataaaatattatgaaaagaaataatacctatatttatagagccatatgaacaggaagaattccagccctgctattcacctggaaaagttacttaatccctcaatcccctcaggataattgaggcacctgtggcccgtgcagttgttgaaaagatgaaatgagataaagtatgggaactgcttggcactgtgattgaaacagattgggcatttgttacatgttagctaatatgattattgctgttggcttttgtctattttaaccactgtaatgttatttttccttgttgtgttagcaagagcttttaggacaacctgggaagtgagaagcaaccacggtttgtacagcaaaacaagtcacaccaaattaggcctctaaaaaggaatggcaacattagcaaagatatgttttgaaatgcatttacgggaaatttcaattgttgcacaaatgcttcccttaaaagggcaaaaagactttacattgttttctccccttcctttacatatacctttcctttcttgaaatagtcgatgtaatttgcagatatttattagatgcattctactacactgtgctacctagaaaataattggggaaggttctgtcttacctcttggataatttatactctagtacccagctgtactaatgacctaagacaacatggtgttaagaggagactaaggccctagaaaaactatacatgaaattctagagggacaagttctatccctttggagaaagtcaagaataacgtcatgattaacatagcatttgagatgggatttgaaggatgagccgaatattaataggaaaaatggtaggattgagcatggggagtgggaggtgggcagatttttcaggtggacttagcaggaatcaaggcgtggggccagaagtagagatgtgtttgggaaagaacaattctgaaggtacaaagtcctacaagttaatgcagtgccctcacacactcctcaataatctgcctttcttctttcctctccaggttatacatctggcatgatagagatcattagttgtcttctaatacctatatatcttttcatccttagtagtaaaaccttccatgtttagctggacacatggccacccggaagtagacatttcccaaccttctttgcagttaggccataccattaagttctgtccaatggcatgtaagtggaattgtcaattatgactcccaggaagtgtccttaacagtaactttattttctttttaaccttttctctattcttttcctggaatgtagataagatacattgatggctagagctctgactaccatgttgtatcatgatgttggagccatgtgctgagagtggtggagcagcaaggtagaaggagccatgagctggaaatagccaggtctctggggatcatggaaaccccatgtgaactgctctgaatttctcaaagaaataaatttctactttgtttaagacagtgttatcttgggttttctgtccttcacagggaactcaatctttactaagactcctggtctcagttgggtgagtttatcagttttgccccagatacttgcccttatctgttggttttccaccacattatcgtggacagatctttcttccttcttgcttgtgttatctgctagagcattctttctaatgtaatcatctcactcccctgcttaaaatccttcaaggtcttactaacattgccagttgatattatctgccttttttgatttaaggcccattttcaaatactagaatttttggcatacaatccaagggattaaaagatgaacgtaagctttttttttaaagaaagctttggcaaattttttttaaataaccagttattcacagtatattataatattatatttgtatgcttttatgattttttaaatctgaaattatattaaaatgaaagatgagtctcatttcttgtataagttcacttttttgttgttgttgttttggcatttgatgtttgtaagagttgagaaccctaattttctgagaaatgacatggaagactgcagcagtacctctggactccacagttgggtgctcttcgagaccatgttgccatttaaacagaatggtttcctccctttgctctgcctgctgatgtggtctagctagctcctgattaaactctgcctcttgcctcttttttacagaaatgtgtatcctctacatgcatcaaaacatcacactataccccataaatacatacactttttatgtcaattaaaaaaaaaacaaaaaaagaaatgtgtatccccctttacaccaagttaaatcactcagcttattatcttcaaagtagtataaacccccagttgttgttgtttttgaggcaaagtctctctgtgtcgcccaggccggagtgcagtggcacaatctcggctcactgcaagctccgcctcccgggttcacgccattttcctgtctcagcctcctgagtagctgggactacaggcgcccgccaccacgcccagctaattttttgtatttctaatagagatggggtttcaccgtgttagccaggatggtctcaatctcctgacctcgtgatccgcccacctcagcctcccaaagtgctgggattacaggcgtgagccaccgcgcctggccataaacccctagttttaaattaaacgtttctttttgtttttttttctttttttttttttttttgacagggtcttgctttgttacccaggctgaagtgcagtggcacgatctcagatcattgaaacctctgcctcctgggcgcaagtgatcctccacctgagccttctgagtagctgggaccacaggcacaagccactacgccgagctaatttttgtatttttagtttgtttgtttgtttgtttgtagtgacagggttttgccatgttgcccaggctggtctcgagctcctgagctcaagcaatgtgcccatctcagcctcccagaaagtgctggtatggcaggccaggtccactaacgcaggcctccataacaactgtttcagtactgactgagtggttaaattaaatattaaaatccagtacccttatgcaaaggctggaatgtaacaaaagcccaccaagagttttgcctaggcctttcctgaaccttaaagcatgattaaacaagtttattgggagtctgaaggaactccccaaacctccatgatttagcaggagacaagataaggataatcaccccagcacctgcacccatttagattaatttactgacgctccacaggaaggtcttcaagactcagaccttagttatagacggaaagaagttaatcacctacgtctttagatgaatgcacacttacatatagacatatagcttagaaggtatataagctctggaaaactttgtaattttgagttggtctggtgataatttccaggccttctccttagaaaaaaataaaggtccctattcctgtaaccggttacagaaataaaaactcgcttcctccccagttcacctgcatctcattattgggccacgagaaacagcagcctgaccctcactttggtccaagaacactgggattacagacgtgagccaccatgctcagctaaatcaaacttatttctatatattggtccacagcaatgttcatgattgataaatgaccagtcttactgtggccaccaggtctgtcaggatcttgatcctgcttaccattcccatctcatacttcattcttcccccaaagcactctgtccttggactgcaccttcacatcagcctatctcacaactccacttcttcgcttttgtgttatttctccagaaacatgttgctcctctttgctttctccacattctgcctagaaaactccctgacgcaacctgcagtagttggcaaagtgagaacatgtcgggtagacccgggaggtgaattgaaggggtaggcagggactcgacttgaaagaacctcacatgccttgagaaggagcttggaacttacctttaaggctgcaagaagtcgacgagtcttaactgggatatgcatggtcggtacttgtcttttagaaagatttctctgtggcagcatgggagacagattagaggaggtgtagacaggaggagagaaaataaactcccaagcccatgcatcctcttgccctcttcccttgttgctttaaaagacaaacatgcgcctgtagtcccagctactcgggaggctgaggcaggagaatggcgtgaaccccggggggcggagtctgcagtgagctgagatcgagccactgcactccagcctgggcgacagcgagactccgtctcaaaaaaaaaaaaaaaaaaaaaaagacaaacatgtagttcttttccatttagagagttttattggtgattattataggaaaacagactggagagagaataaaagtaggcgctgcagcaattctcaggtgagagatgatggtggcttggacccaggaatcagcagtagaattggtaagaagtgatcaaattcagcataaattttgaaggcagacctactaggatttcttggcagtttagatatggagtatgagggaaagggaggagtcaaagataatgccaagacttttgacctgataaaccaggaaaatgtagtaggattagctgagaaggagagattgtgggagaagcagactggagtgggcgagggtaaattcaggagtccaatcctttttttccccttaattttatttacttatttatttagagacagcggtcttgctatgttgcccaggctggtcatgaactcctggcctcaaaccatcctcctgcctcagcctctcaaagtggtgggattacaggagtgagccactgtgcccaactcaatctttcacatattcaatctgaggtgtctgtgattcgagtggaggtgctgagtaggcagttggacatatgagtatgagtccagaagaaaagctggaactgggctggagatacacatttgggagttcagcatgtggatggcacagggggaagaagagacgctagctatggagactggaaaggaatggcctcgatgaagaaggaaaaccaaggaagtccgtgtcttggatgacaagtgacatctggaaaaataaaggagcagtgtggtcagggagcctgatgaaattctgactatggatgactcactgttttgtgtaaaaagggggaagagaatttattctaaaaatttgttcatatctacataaaatacttctggagggatgctcaagaaactcatggtattgtttgcctgtgtggacagagaaggaaggccaaagaacagaggtgaaaagtagatatttcaactgaataatcttgtaagccttttgaattttaatgtgaatatatttcccagtcaaaaggttatttattgatatgaaaaaaaataaaggtcactggaatcccaaaccacaaacaaaaacagcccttgctgacttcctgtggacttcatagtgtctaccactggccccgcggggctctgcagcttccacttgagtggctcgatacaccctgcgtcagccatgctgaaccaaggtgttcaagctctctgcactctctggcccttccttgagcctgcatgcccttcccactcccactcttcccgcaaccttggcagggctctcctcctccccttcaggactctgccccccaccaccctccagtctgggctagagtctagtagaatctcccttgctaagagaacaaggtgcatgtgacacccttctcttcctcccttcagtgtgtgagcaaatagaagaaatgattttagccacatttttaatgttcaccttacaacatagttgaggcaatcctgaccagtttctccatcttctgtgaaatttcttcttccttgtgcagccatgcgcatgaattctatatttatagtcacatctccagtctgttctgcatgtcaagaaaaggtttgggactgggtgcggcagctcatgcctgtaatcccagcactttgggaggccaaggtgggcagatcaccaggtcaggagatcaggagcatgttggccaacatggtgaaaacccatcgctactaaaaatataaaaattagccgggcgtggtggcgcacacctgtagttccagctatttgggaggctaaggcaggagaatcacttgaacccaggaggcagagattgcagtgagccgagatcgcaccgctgcactacagcctggtgacagagcaaggctccatctcaaaaaaaaaaaaaaaaaaacaaaaacccaaggtttgggcagctgggaaggccaaaatgaaagaagcacgagaaaaagttctgccaattttgtaaaatagcataagtggtctcctcccagatgcctttctggcaccccaccccaccccatggttgaccgcaggcagagtctggaaagccccacagccacccgtgtttcctcccacacagttctgtcttttatttctcggcttgtgtccttgggagggactggcctgaaccaaataggctgtcacgctgtcctgagttggagccagacagtgccaaccatcacatggccttctctcttaggtctcacaaagtgtgtttgaagatcagcagcatctgcacctcctagaagcctcatcagaaatgcagatcttggccgggtggctcatgcctgtaatcctaacactttgggaggctgtggtgggcggatcacttgaggtcaggagttcaagaccagcctgaccaacatggcaaaaccccgtctctactaaaaatacaaaaattagctgggcatcgtggtgtgcatacctgtaatcccagctacttgggaggctgagtctgaggcatggcgtgcacctataatcccagctccttggtaggctgaggcaggaaaattgcttgaacccaggacgtggagtttgcagtgagctgagatcacgccactgcactccagcctgggtaacagagcaagactctgtctcaaaaaaaaaaaaaaaaatgcagatatcaggcctgccctgacctactggatcagaatccacattttattcagatccccaggagatctgtgtgcattttaaatgagatcactgccttagaggctcaagaaatacttttggcattggagaaaattcagtccaagtgttaatcaaacatgtcaggactccttctcttagggtccactgcccttgaccgccatatcagtactctcttaataccctagtgttatcctcaacaaagcatttaccacactgcatcattgtcagtttacttgtcagccttccctactacatggtgggtctttaagaccctgattgtatattctccctctcagcacatgtctgttgtatgaatgaacaaatgtataaatgagcgaatgagatttcacatgaggttccaggcaaacttttattcagtgtttcactctgtgttgactttgcagcaaagaaaaagccaccttctgcacttgcccttgtcctctgatgtcaccaggcaatgtttgtttgtgatacagaatgcccttgccagcccacccccccactaattgtaaacacttttaaaaacattgttattgaagcatactatccattcataaaaatgcacatattgtaagtgtatagctcactgaactttataaactgagcatgccagtgcaatcagcacccagatcagagacagaacattaccaccactgcactgttgcctcccttaagttccgtttcagtctctataaatcctgcttcctaggggtaaccactgcctgacttccaatagcatattaccttgacctgttcggctatttatctttcctttgcataaacagacacatacagtatattctgtcatgcctggctccttggctcaacattccttttgcaagatttctccataatgttgtgtgtacatctaggctgtgcacactcactgctgtacagtgttccatgtgtggatataccatgatttacttatcctttcaaccgtggatagacatgtgggtgatttccagttctgagttattattatgaatggtgctgctatggatattctggtacgtgtctttcggtgaacacattgtagccaggttttgacatgctgctttgaagtttagacagttgcaccctgccaggagatttcctttaagacccctgcaccaggccagaaacattcactgcattgcagcaacctgattctgtagttgttgacacaaatccaacacccttctccctaccccagcttgggtaggggttaaaagtagatgaagtagggagggaagctgttttcaagttacaagaaaaagttctttacaactgctggccttgttcatactttattttcctctcactcacttccgtttcttttccaggtaagcctgattgcaagcttcattgtacctgtttctttctgactcagattccagctcagcttacatttttcccactaagtaggcagtgatatttcatcacagcaggtacttacaccttttgttctgatgacttaaagcacaagtaggttttgataagtgcttgcagggtttcattttcaaaagtcctatttctgtgtcatatttgttggctttgagcccagtttctcttgctctgccaacagagcaggttatgcctatttgctcatggaaataacattttcatgagcaaaggctaaccccaaatgctttcctcctaaacgttcttctcatctacaaatccatgtttgaggaactattattttgtcatttcttacaaaaggtttttatttgaaattcagagttgagtaaacccatggaagagactcacatggttgactcactctctgccctctcctgcacatgtgtctcaggatttcttaaacccagccgagcacttccgcaaacctcccagacctgacctcctcctcccttccaagctgctccccttggcttccaaagcagcccccttctcctttcttcctcacacacacactgcaccccactcagctctatccaaccaatgcacggtcctggaaggccctccatacccacttctctcacctctgctcaactgccccctttcgccatagatatattcccagtgtatttttctctcttttggttattaattcttctgaacatgaacttcacatacctatgtatgtatgtatgtatgtgtatgtatatacacatacatatatacatgcagttaatcctcattattcatggatttggtgtttacaagtttgcctacttgccaaaatttatttgttattccaaaatcaatatttacagagcttttgtggtcactcttggacacactcagagctgtgagaaatttgagtctccggaggcacacagtctcaactgaggttaaacaaagtgaccctctgccttcctgcttctgcgcttatactgtaaacaagtgtcctttttgcagtctaatgtcaccttgtttacacatttttgtgcttttcgttggtgattttgcagtttaaaatattccccaagtgggtgctgaagtgctgtccagggttaagcgcaagaaggctgcgatgtgtttagggacaaagtgtgtgtgttagataagctgcatcaagcatgagttacagtgctgttggctgtgatttcaatgttaatgaatcaactatatattacaaaagtgtcttgaaacagaaaaacatatacaatgagattttgtattgattgatgaaaatgtgaacagaggctctcaggaacctactatatttcccctgggagcaaaggttcaggattcactaatgcaatgtttatgaactttctaagatataattactgcaaatcatgagaatcgactgtatatatttcttgtccttctggttaatttgtatttgtttctttatacctttctcactctgttcccaaagaagtggagaggggcagtttcttccaggtataccttacaattctgtcgtctctattgcagcccccagctcagtacaaacaacatagtaggtcctcaaaagattcaaaaggaataaaagacaggagtggagaaaggaaggaacaaaagaaggaacgatggcagaacgaaaagacgcaccatggaagctgagggtgctgcttatctaagcgggcgtggcttcccagaacttctcatctctcactccttaaatgcttcctctttatttcattgaatcattgaactagaataatataatatcagaaatcaagttatattttatgatagatttggctttttctgctgctctttgcaaaatctaacaaaacaaaccttccagtttctttgatttttttttcaaacttttcttctccctctcctcatcctctactccttgatcttcacttggagaaggacaattctagaattcctgaactctaggccaaaaggaagtgggcaatcatggcaagcataaacacatccatggcaagttatcagacaccttttgtgggtactaaacagcagggatgcccacttgtcccttggaagtttgcaaacatactgggaaaatggggactataaaattaaaccaccaaagatcagtgtgggagactgaataattaaagggtatccaggtggaccagtcacaaacgctgtaggagctcaatggagacatcagtgggcatcttcctggaagcagtgaggcttgcatggaaataaaaaacagggggttctaatttttgttattgttcaccaatatcagcaaaaaaggtgggcacaccctcaataaatgtttgcaaattctttacatgtgctaattaatcatatcttaagatgcaaaatacattgagggcaaggtttactcttaacaatggtcaatgtaaatccttactttaaataagcatcttataattatgatttgcatggggggcacattttgtcagatcttatttgtcatcattattttgttttgtttgttaatacactcatcttatcttggagtaggagaattattaggtctgttaatctttcttgttgctcactgttattttgctatggcagctcaagctgagacagaaattggtaccaggatgggtgctgctataacaaatgtataaaaatagcaaagacgtggaatcaacctaggtgcccatcaatgatggattggaaaagaaaatgtggtacatatacacaatggaatactatacagccataaagaagctgtcctttgcagcaacgtggatgcagctagaggccattatcttgagtgaattaacacagaaacaaaattaaatactgcatgttttcacttataagtgggagggagataaacacagggtacacacaggcataaagatagaaacaatagacacaggggactccaaaaggggaaagggaaggagggaggaaagagagttgaaaaactacctattgggtactatgttcatgttcaccatttgggtgacagttcagcagaagcccaaacctcagcattaggcaatatattcatgtaacaaacctgtacatgtacctcctgaatctcaaattaaaataatactactactaataaagaccaaagtatttcagagggaggaagaatttgcatggtgaaatttgcgtagtgaaattggcatccatatggtgcataagggatatctttggatcttctgaattacattatatacattttttaaattaaaataaattctaaaaatgtggaagcagtaatgatgcagggtgatgggtgaaggctaaaagagttttgagatacatgctacaaaaagccaaggttgctgtgaaaaaattgctaaagatgattctggtgaggactcaaaaagagcttctgtcttccttctttgaggatgcgtaaacaatcgtgaacagaatgctagcagaaatataggtggcaaaggctattctgtgaggcctcagatggaaatgaggaacatgttattggacaatggagaaaatcctttttataaagtggcaaataacttactgaattgtttatgttctagtgttttgtggacggtagaactttcaaacaatgaaattggatagttggctgaggccatttctaagcagagtgctgaaagagcagcttggttcctcttgaccactgatagtaaaatttaagaagagagaaatgaattgaagaagaaattgttaatcaaaaaataaccagcacttaaagatttggaaaattcttagcctgtccttactgcaaaaaaaatgagaaaccatgttcagaagagttaggccaagcatggtggctcctgcctataatcccagcactttgggatgccaaagcaggcagattacttgagctcaggagttcaagaccagcctgggcaacatggtgagaccccatctctattttaaaaaataaaaaaagaaaagaaaagaagagattattaagagtgtggctggtcacccatttgataaggagagtagtgtgagtatcaaccatggacctaatcagccatctcaacagaagccagaaatagagttgggattattccaggagaaataatgctttagtcccctgccagttgggactaaaaggaaaagagaaaacaagatggaatgaagtaaggctgtgaatatgcaatccccttcaggaaaagagaggaaggatcccaaaggcaattcagacatcatcagggctgctactcccaccacaggcccagagtggaaaggcccctgggaacaaggctacctccatcttggtttcaaagagtgggactgctactcagcactcatgtgggtgtggccctcacagacagccatgtgggcagtgctacactgagctgaagaagcagggacaccccactgaaagatgggggtgataccttccagtggttctggaagggaggaccaccaccccagtgggcctacagggcagagcattctttgagccaaagaggattgtatttcagttttaaagcctaatgaagtttgacttctagattttggatttcttggtacttgtcacccctttctacctttcaatttctcccttttggaataggaatatctatcctgagcctgttccatcattgtatttcggaagcacataacttgtctggtttcacagattcacagttggaaaggaattttgccttagggtgaattttgagtctcactcatattggatttacatgatatttagatgagactttaaactttagagttgatgctggaatgagttgacttttgagactgttaagatggaatgaatgtattttaaatgcaaggaggatgtgaattttgagagggacaaagggcagaatattatgaactaaacgtttaagtctcccccaaattcatatattgaagccctaacccccaatgtgagggtattacgaggtgaggtctttgggaggtaattaggtttggatgaggtcatgagggtagatcccttgtgatggaatcagtgcccttataagaagaagagagactagagcttcctctctctgccatgtgaagatacagcaagaaggtggccatctgcaagccaggaaaaggggccatggcaaacactgaatctgctcacagtctgaacttgaacttgtcagcctccagaattgtaagaaatgaatatctgttgtttaagccacccagtctataatattttgttttggcagccttagctgacccaggcactcacttatgcttacattctaacttctaaattaaggctgcaatatatgaaacatgatcatagaacttgtaattatctgaggatccagaaaaatcacgagcctgcacaaggtttatccagaggcagaggaaataccagttcactgagaaaaattaaagggacagtagaagaataaaatatagttgtttataattgtatgttacaaattatgtttgtgaagccagttacataaataatcttaaagatttaatagtttctgcctgcatccaaataattgccatgtgcctatgtccatacgcctatgtccatactactttggaaacctctaatgaatgaatgtgtaaagtttggatgggtatttgagagggaaaatacttcttatgaggttgacagttataagcaaagttaggaacaaaaagcaaattcagaaaaaaactcatcttttgttatggtctaaatgtttgtgtcacccccaaaatttatatgttgaaatcctaacccccaagttgatggtattggcagatggggcctttggtgaatggaatttgtgctcttacaaaagggacttcagagagcttgtatgcccttccaccatgtgaagacacaggaagaaggcaccatctatgaaccagaaaatgggccctcaccagacatcacatctgctggcatctttatcaaggacttctcagcctccaaaattgtgagaaataaatttctgttgtgcataagctacccagtctatggtattttgttatagcagcctgaatggactaagacacacttattgaacccccacgtgtttttctgaagaatgaatgcctcacattttacacaagatgtctgtgtgcactggggccgtctagtctaccctggcctggtgatcagggcagggaatcactgaagtttcccattctctaaaagtggaggaaatggcagccatggggaagctgccttctgctaacacaattgagccgtgaaaacaatatacaactatttttgttatattccagtggtcacacagagcaaccccaatacaataggagggcacaccacaaagccatgagtaccaggaggggtgatcactgggagactccttggaagctggctgccactgtgaggcattatctctgtttcacagaggagaaacagaagctccaataaataattgctcaagtcaactcaacttggaacaggcaggtctggggttcaaacccagacaatgagaccccagaacacatccttttagaacactgccctataccctggcctcaccacaggcctttttttctaacttcctctcttcccctcaccgcgcaaaacattgcaaatgagatttttcctttttcttagaccatttcaaaagtcattgttacttaagggtggaggttggaagatttccaaagaataaaatatacagagaatatctaaccaaagttcctaacacatacacaattcagaaaatgtaactcacagacaagggataacaagaccattgacccaatttcagagcttgacgtttacaaaatgaacacaaggcagtgtgggttgtatgcgcgttctgttcagtttctctcctttggggttgtttgggtcagcctgttgtctcatgagactgggtgggctaaattgagcaacattttgctataataagtctgcaagattagaccttaggcaacaaaagccggaaggagaaactacatttcctataaaatgtggaactgtgggataacagtgtaacaacactatgactacaaacagggaaatttatatatgagaaggaactggattgtatgttacctatataaatgatcatgagaaagtcatgttgttcttttgttgtgatcttttaaaccaaatttatagtgcattgaaccaagtaattgtaggccattattttaaagtaggttgtagcacagcatgaattaataatcacaccaattttattttacttcattggatttatttagcaattgtttttagcacttcctatatcccaggccctcttctacgcactttaaatgtattaacacatttcaattaatcctggcaacagcctgagaggtaggtactattactattcccattttacagatggtgaactgaagcatggtgcaattaagtaagcagccaagattcaaccggaattcaaaccaagcaatcaggctccacaacctgcctttttaatctggctctctgccttgtgcaaaaagatggtgagttagtccgttctcgcactgctataaagaaatatctgctgggcgcggtggctcacgcctgtaatcccaacactttgggaggccgaggcgggtggatcatgaggtcaggaattcaaggccagcctggccaagatggtgaaacccgtctctactaaaaatacaaaaattagccaggtgtagtggcaggcatctgtaatcctacctacttgggaggctgaggcagagaattgcttgaacccgggaggcagaggtggcagtgagccgagattgcgccactgcactccagcctgggtgacagagcaagactccatctcaaaaaaaaaaaaaaagaagaagaagccaggcacggtgactcatacctgtaatcccaggactttgggaggccgaggcgtgtggatcacgaggtcaggagttcaagaccagcctggcttatggtgaaaccccatctctactaaaaatacaaaaattagctgggtgtggtggcaggcgcctgtaatcccagctactcgggaggctgaggcagaagaatcacttgaacccaggaggcggaggttgcagtgagccgagatcgcaccactgtactccagtctgggtgacagagcaagactctatctcaaaaaaaaaaaaaaaaaaaaaaaaaaccctgagagtgggtaatttacaaagaaaggagattggccaggcgcggtggctcatgcctgtaattccagcactttgggaggccgaggcgggtggatcacgaggtcaggagatggagaccatcctggctaaaatggtgaaaccccgtctctactaaaaaaaaatacaaaaaattacccgggtgtggtggcggttgcgtgtagtcccagctactccggaggctgaggcaggaaaatggcatgaacccgggaggcggagcttgcagtgagccaagattgcaccactgcagtccggcctgggcgaaagagcggaaatccgtctcaaaaaaaaaaaaaagaaagaaaagaaaagaaaagaaaggaggtttaattggctcatggttctgcaggcttcacaggaatcctggtggcttctgcttctggggaggcctcaggaagcttccaatcacggcggaaggcaaagggggtgcgaggtgtctcacatagtgggagcaagagcaagagagagctagagaggaggtgatgtacacttttaaaaaacctaatctcacaagcactcactcactatcacgggaacagcaccaaaggaacagcaccaaggcgatgatgcgaaaccattcatgagaaatccgcccccatgatccaatcacctccccgccaggccccacctccaacactggggactacaattccacatggatttgatgggaacacacacccaagccatgtctgatggacacatagtttattttcttttgtgactctgcataggccattcttgccactgggaccccttccctcccaatcctcctggctttccctgcctgtcagcaaactcctgctcctttttcaagcatcaactcggatttaccctctgctgtgatgtcttctgtgactcacatgcagatttaggcacctgtttattgtgttctcaatatatcttacccatactatagaaatatttgttgttttttatctacctagtgttaaattaaataagcacgaggccattggccagaggccctctccatattttgagtttctgtggaacaaacagcaacctaatagtatgtaaacaaactgaaacctaatttaggagtatatttttgtaacatatagcctggtttcagccaatcacagagaagcttcagccaataataagcatccaattgatgagaccacgcccaataaggcagatgcctagctgttgccgatcaagtggtttctctacattgcttttgtgttcaccctagaaaagctcattgctcacactgccaagtggagttttctgaacctcttctggttctgagtgctgcctgattcatgaatcattctttgcccaaataaactctgttaaatttaatttgtctaaactgtttcttttaacactagcttctattccgccttctctgacaagcgttcaggaacccaccccacccccaccccgtactttgggtgtagcccatgtgatttaagtctagccaatcagagcactaaggagctacagttcagaggtgatcatgagacccaggttcatcgaactagagtgaatcctgggactgagcatgagcggctgggaagaaacacacaagtttttgttgcaagtctggagctgctagcagacttcacatactgcctgagcatgaagcaaaaataaagagagtgaaaagaatgagagagaatgggaaagagtctgctggtgacattatttgatcctctgaatgatgcctcacttaaattcaagatatattcttggattttgtgcattaacaaattccctttttgagcttaagcctgcttgatttatctatcatttgcaaccaaaggaacattaaccaataaatacatttcactgtatatctgtgtctatatatctatatgtatttcattttaccaaggtgtctccctactaaccataattctttgagggcagtagatgctcaatatttgtcaaatgaattcagctgaagggtgttttgaaggagactgaccttagaggagggacattttaggaaggctaatggacttagtgtgagatgtgatcaagggactcaaccaagttgaagagtaggattgaaagggaagggacaaataccaaagaaagatttaacaaggcagtgatacagagtggggtggagcaatagttagattaaagcctgagtgctaccctgttctgcgtatttgtttcttttggtgtctctttagcagccagcctaaattaaaagtttattgtactggctgattattgcctgtctaaatcacccgtctctgttagtttatcacaagtgaaaaaattaatgatagagaatcagagactcacatataagcaaataagcatgattattataagaaagagcttttattaaacaatactttcaggtcttcataagaataggggtagaatttcagagacccacataactcagtgtgcagtaaatgctgctcctgggcaacttaatggagcataaactgccagcaacggtcccaattgaaatggagactggaaggtgaagttgtccttcctttctgtaaccaccaggcaagaggacacttgtaaggtgtgagtagcagcacccaaaaaccagctgcaggactcagtggaagggaggaataaggtcactcttaaaatcctatcacctcacatagaaaaatagctaagtcctaattaagctcaacatcgccactctcagcttatccctgagacaggtcaggagaagagggaccatttgctttgctctgggattgttgcacttctgcaatctgactttgtaaaaaaaaaaaaaattaatttaaacagttgctaccatatgggatagtgtagctcgatggtttctttctctctctcgtccctctcctgctctgccttctatgtatttaccacccctcttgcagaaatgctctcgtggaatgtggcttttttttttttttttttgagatggactctcactcttgtcactcaggctggagtgcagtggcactatctcggctcactgcaacctccgtctcccgggttcaagcgattctcctgtctcagcctctcaagtaactgggattacaggtgcccaccaccatgcccagctaatttttatatttttagtagagacagggtctcaccatgttggccaggctggtctcgaactcctgacctcacgtgatccacccacctcggccgcttaaagtgctgggattatggatgcgagccaccgtgctcagccggctttccattttttttttttttaagagatgggggtcttactctgttacccaagcagtggcttgatcatagctccctgtagccttgaactcctgggctcaagcaatcctcccacctcagcctccagaatagctgggattacatgtgtaagccactgcactcggctaattctttagtgttttgtagagatgagggtcttgctctgttttggtcttgaattcctagggtctccctatgttgcccaggttggtctcaaatccctgggctcaagtgatcctaccacttcagcctcccaaagtgctgggattacaggtgtaaaccactgtactggccaacttcctgtgttttaaaaatcctcccagttggggccagtgccctaacctaatggatgcacaatgagccagttgaatgtggcctcttttagtcaaaaggaaagattctttttttttttccaagtatttctttatttatattactaggcttaagttacatgaagaaagacaactaagcagttctgcccatttcagaaaaagtttccaatcatcaccaattatgtgacaacaaataactaggaatggtgacagctttgggtcaagaccaacaaggaagaatgggctctggtgctacagttcatttccaacaagaatatggcacaccagccagcacagccatgctaacactgggccttcagtgccaagcacagattcagatctattctctgaagttagcaaatcaagtgaaataactggaattttttttaagtttaaaatgaagcccaagtaagtttaaaaccatactcttgtcatattttcctttcaaaattcacataaaacacacttttcatgccaatagcccagatattttttcttacataacccactatgtagctgcagacagactcttctacctcaagatgtaaacacaggggaaaaaattaatggccatctgtctaatattctctctatacactgctgttggatggaaaatacaaaattttgttttaaaggttccatcttagattctcgcaacctgcaggtcatacatctgactctgatgctaaggtgacagtgaatgtcacctgatgtttgttttcagtaagggggatctgggaaggatgaatttatctctttttcttcaagaattatcagatgatacatgctcctcagagccttcactctcttgaacttcagcactttccaggatcacacagccttccttataacatggctatctccagtggcaaattcataaatccaccccggtttgctattgcaacttttgcagctcacatcttgaaccctgtggctgccagtgagcatgaccagatcttaaagttcactgcacagcaggttaacgaccttgttaaaaggccagggcgcctgtgaactgagtggagatgagttctgggcggttggtcaggatcatgtcagtttgcacaggaacacagacaggtaccaccgatatgatcaaggaaaattctgcccatttttatagctgaagttctaaaatctctgagtggcgatgagatccatggctgccagatctcctcgcctgggatgaaggccccaggattcttgacagttaattaaaaccagaattcatactgaagcaggaaattttccctgacccctcacaggagggggagtgcaggtgagtgggtgcaggaattggggcgagtgctttggggcgctggcaggagcaaaactccatgaggccctgcagcacggtctagtggggtacccatgactcctgaagccccagaaagagtgttacagtgctcttttagcgttgccatctgtggacagcttaagtgttaataactcagtggaaagtcagtgtgacagccttttgcactcgcacccaagttctcgttcgacatctaggaggaatgaggtcacacaacaaattggaggtggtatatgtgggggattttattgccagtgaaagtggctctctgcagaaaggggagctgaaaaagggacagagcaggaaggtaatcttcccctgaagtccagccgtccctgctggactcctctcgaaagctacaacgtcaagccgtccggtgtccttataagaaaacagccttgctggttgcggtggctcacgcctgtaatcccagcactttgggaggcagagcaagagagagctaaggtggaggtgctgcacacttttaagtcaagctgcttctcctctctgccggctgagttctggggttactatagacacaagatgggggcagggcaggctgtgggtggttttggaaaaggcaacattccagcaggaaaacagggatgtaagttttcactttgggccgcggtattacgcttttcaccttgaggccggggccgtcgctggggacccaccctcttctgcccagaatttttctgcatcctgtccctgtcaatacggaataaaatggtacactgccatttcgcgttattcatttttttaaaaatacatatcctttaagctggttatttacctctttttaaaaggaaactgtaaggtcttccagggcagggagtatgtctgtaaagccttctagagctgggctccttgcttcctgatctcactctctcactgtctgtaggctcttgggcaggttatttaatttcttagtgtctcaatttcctcctctataaaacagagataatagtatttagcccagagggttgtggtgaagtgtgaatcatttctccatgtaaaacacataggacaggctgggcatggtggctcacgcctgtaatcccagcactttaggaggcctaggcgggtggatcacctgaggtcaggagttcaagaccagcctgggcaacatggagaaaccccatctctactgaaaatacaaaaattagctgtgcgtgatggcgcacacctgtaatcccagttactcgggagactgaggcaggagaatcacttgaacccgggagcggaggttgcggtgagccgagatcgtgccattgcacttaagcctgggttacaagagcgaaactctgtctcaaaacaaaacacacataggacagagctcagcacagagtagacattaaggattatatcctttgcttggcacaataccttgcacagggcaggcacgcaacagatgtctctggaatgaaggaatgaatgagtgaatgactgggttaagcatgttgccaccaggtggcagaagagcctcactatcaaggcagaacccaaacacgagactcatgagaactccctcctgaagtccagatacacattgaaaaaaaataaaaaaagcactgaaccccatttaggccttgaagtgaagttcctcttctctcttgcccttcctttctctcccatctctgctcactctctgctgtaatgaaccatttctttctttcccacttaatacatattagtcagtttgggctgccacagcaaaatactacagactcagtagtttaaacaacagatatttaatgcatcacagttctggaggttggaagtccatgatcaaagtgccatacgggctggtttctggtgaggcttctcttcctggcttgtagctgtccaccttcccactgttattctcacagggcctcttctctgtgccacacagagagaggaaggagagggagtgggagatggagagatgtcagattcacacaatgaagccctaaccgccattttgactgtatttgcaaatagggtttttttggtttgttttttgagacggagtcttgctctgtcgcccaggctggagtgcagtcgtgcaatctcggctcactgcaacctccgcctcctgggttcacgccattgtcctgtctcagcctcccaagtagctgggactgcaggcacccgccaccacactcagcaaattattttgtaatttagtagagatgggttttcaccatgttggtcaggctggtctcaaactcctgacctcgtgatccgcccgccttggcctcccaaagtgctgggattgcaggtgtgagccactgcaccgacctgcagatagggtttttagggagggagagagagagggagatctggagcgtcttcttataaggacaccagtcctatgggattaggccccacccaagttacctcatttaatcttaattacctccctaaagaccctgtctccaagtacagtcaaaccaggggttagggcttcattgtgtgaatctggaggggacactcttcagtttataacacgtacctttcattttttaattcctaattctcacacttcctaccaatgtggtttttcattcttactctcttgttattcccactcttcccccgacccccatccgccatccctcaatctttatatggcttttctagggctagttgtatttattgtaaactgaaaactccagggggcaccattcatgccatagtcagcataggtttgcatatgtattatgacaatgttgaggctgatggcagcaacatgtcttgaggaaggggagtctttttctcattcacacaaaggtgctggccccttcgttttcctctgttgttttcctgtcctcctccccatcattctctttcttcagcctttctctctctttccttactctcctcttcaggctgaacctgctccatgtccgtaaagagatgatttaattcatcgcaccacacattcatccagtaattttggtgggccaggccctttgtgggtgccagatggttcaccctattcttgcacctttaaaggaatcggtccatttacaccctagaggtcaatacccaatggaatgtgcctccaacatccttggatcattcatggtcttcatttaccttggagcagacattaagactcaagcattggccgggtgcggtggctcacgtctgtaataccagcactttgggaggccgatgtgggtggatcacaaggtcaggagttcaagaccagcctggccaacatggtgaaaccccatctctactaaaaatacaaaaattagctgggcatggtggcacgtgcctgtaatcccagctactcgagaggctgaggcaggagaattgcttgaactgggacctgggaggcggaggtagcagtgagctagatcgcgccattgcactccagcctgggctacagaatgagactctgtctcaaacacaaaaacaaacaaacaaaaaacaacaaaaagacaagactcaagcatggaggagaagagaagagaatataatccaataacataaactaatgtttattgaacacttgtgtgctgcacacagttctcatctctctctatgcatgacatttaatcatcaaaactgccttctcattttgtagatgagaaaactaagctgcagagaacgtggcagagactcctcctggtttcctaacttccattttcttttcctttatttaaataacaggagctcatgagttttggctgggcacatggctgcccaaggagagccgacatttcccagcctcccttgcagtttgatgtggccatataactgcattctagacacctgaggtgtgagtggaaatgatgtctgcaatttcagagttccatccttaaagggaagctgcttgcctctatgtcctcttttccttgtccccaggctgggacagggttaggggagtagtgaggcagctttgacaggagggtgaggacaggaagctggggaagagcagagcaaccactggaaggaagcttcacactcactccccacccactcactactcacccagagcaacttcccatcctgcaaactccaatcacgggaagtatcctatagaggggtatcctttttaaagaaaaaaaacctttgataccatatttttactgtactttttctacgtttgtatatgtttagatatacaaataccattgtgttgcaattacctacagtattcagtacagtaacgtgctgttcaggtttgcagcctagagcaataggctacaccatatagcctaggtgtatagtaggctataccatctaggtttgtgtaagtactgaacactccatgatgtttgcacaacggtcaaattgacaagtgacacatatcttggaacatatccctgttgttaagtgacacttgactgtatttctatttgggggaacagagcattgggaaagaaaacagaaggacccattgccttgaaggaaggatggtagacggaataatgtccaccctggcctcccaaagacgtccaagtcctaattcctggaaatatgagtatgttactttacttggcaaacgggactttgcagatgtgcttcaagtcaggaagttgagatggggagattgtcctggatgatttgggtggaccccatcaaatctcagggggctctctaagggaaagatgaaggtgggagcgtgagagccagataagacactgtgatgatggaagcagaggagagagagaagatgctacactgtgggccttaaagagagaagaaggggccctgatccgaagaatgcagcttctagaagctggaaaaggcaaggaaatggaatctgccctagaacctcactaggaatgaatcgcagctgacaccttgcttttagctaagttaaacccattttggacttctgacctccagacctataaaatactacacttgtgtttttttaagccatcaaatgtgtagtaatttgttagagaagcaataggaaataatagagagtgtgatagggtccctatggggaacgagtggcgcacatataggacataactgaccaaagtttaatgagacactgtgttttacagaggcttggccagggttaaaggcgaacaaacaggatgagaaatcaccaaggcattagcagcagcaacgagccagcacctccctgaggcttgaagggcaacgggaaaggaaaggtgttactagagaccagtgagaggagtcatggcagaggccacccaacagaagtagtggccacaaaggtgggactgtgggttgaacagatccccagaggtgtctgttatgcacagtaagctccaacagtgaaaaatcatttataaagggccgaggacagtggcttgcacctgcaatcccagcactttgggaggtcatggtgggcagattgcttaagcccaggagttccagaccagcctgggcaacatggcaaaacaccatctctactaaaaatttaaaaacttagttaggtgtggtggctggcacctgtagtcgcagctacttgggagggtgaggtaggcggatcacttgaacctgggaggttgaagctgcagtgagctgtaatcatgccactgcactccagcctggatgacagagcaagaccctgtctcaaaaaaaagaaaaaattatcaaggacttttgcctctaataaaatattcacagtggtttccttacttaatttctgaggtcaaaccagaaaatattagcagctgacttaattcaagaaggaggagcttgagtatacgtacttgttggtgtgtcttcaactcttgttctagattttactttgttttaaatatgtaaaaatgcttttagtgattacaacttatgcttcttatttcaacagatattttaaagggaaaaatatataattggatcacaggatataaaaagaaatgcagttatctatatgtgcaaaagcctagctaattgataaaagctataagttgagtcctgccactcaccttggggcaatgattttttatttatttattttattttattattattatttttttagacagagttgcccaggctggagtgcagtggtgcgatctgggctcactgcaacctccacctcccgggttcaagcaattctctgcctcagcctcccaagtagctgggattacagggtgcaccaccacacccagctaatttttgtatttatagtagacatggagtttcaccatcttggccaggatggttccgaactcctgacctcgtgatccaccactcggcctcccaaaatgctgggattacaagcataagccactgcaccacgcccggccaatgacccatttttttcaggcaaagtagcaatgggaaaatataaagtttctctagttttaatatagaagtggttaacctaatcacacaagccatacacagggtcatttgggagaatgtgcaaggaggattgcgtatttttatcttttcatagttttcttcttgataaataagcttctattttcaagccaaatctcatcttgcaatttcctgccaacttcacttctctacaaagtttacctttgcttttcccatctctgccctcaggcatttaacaaacactgtgccttttcatttttccagatttaagtgaaacattttgcagaaatgaggaatgtgataacagcccctgaagccctacctgacagcatgacattaatttgggcctgttttctctcatacttttcaattgctccccaatttatatttaatttgccacaggatataaaaagaaatatttctttaatttatattaaatacatctacattaggagagctagaggttatctaagtgaaactagctcgattatctaaaaaaagtcagaataaaataattataagcaaattggaagaacagccaacgttgttaccaataatttcttagagtttgttcaattattgtttgttatactctgtttccacttctttagccaaaataagctctaagcaaattcaaatctatttgtatagatgaagtctatgaatttaacatgataacttgaaaaaatgtaaaactttggctgggtgtggtggctcacacctgtaatcccagcactgtgggaggctgtggcgggcggatcacctaaggtcgggagctccagaccagcctggccaacattgtgaaaccccatctctactaaaaatacaagcattagcgaggcatggtggtgggcacctgtaatcccagctactcaggaggctgaggcaggagaatcgcttgaacccaggaggcggaggttgcagtgagccaagatcgtaccattgcattccagcctgggcaacaagagcaaaactccgtctcaaaaaaaaaaaaaattaaaacccaaataaattcatgtggatcttacccatatttcccatgatttagataggagttggttttaagtttatttttccactcaatgggggaaaggatttactaggaaaataatgtaaacaatctatttaagaagtcaaatggcttttaagcacttaaaaagctttgatattagcaatttacccataaatattttgttaattacataatttttttctttttaggaaatatttcttcttttcttcttcttttggctaagcctcagcagccaaattttttattttactttattttagtttactttttagagacagggcctccctctgtcacacacgctggagtgcagtggtatgatcatagctcactataaccacaaactcctgggctcaagccatcctccctcctcagcctcccgagtaggtgggactacaggtgtgcaccactacacccagctaatttttgtagtttttgtagagacggggtcttgtcatgttacccaggctggcctcgaactcctgggctcaagcaatcctccttcctcagcctcccaaaatgctgggattataggcgtgagccacagcaccagcctaccaggtatgcttttaatacatatatattgaataaataaacaaattaaagatcatctgacagaaccttcactggataatattattttttcttttcctttttttaaaaaataaggcagggtctcaccgtgttgcccaggcttgtcttgaacttctgggctcaagtgatcctcctgcttcggcctctcaaagtgctgagattacaggactgagccaccacaaccagccttcattggataacatgttatttgacatttcttctatcattgtacattgatgactgttggttgcctgcccagcagccattgcccccattactcctgttagaataaccctgattttgtgtttgtcattttattttattttatagacaaggtctcactccatcacccaggctgcaatgcaatgtagtgatcatagctcactgcaacctggaacgtctgggctcaagtgatcctcccacttcagactcctgagtagctgggactacaggtgtgcaccaccatgccaggctaattattttattttttgcagagatggaatctcacttcatttcccaggctggtcttgaactcctggactcaagccatcctcccgtttcagcccctcaagcactgggattacaggagtgagcccaccacacctggcagcgtccatcttttaaaaacttgattcagggaagggggcatcctattcctgctagagggcaaaatcgtggttgatgtaaggtagtgattttcaactggaggtaattcggcaatattttgcagtttttgttgccacagaggtaagcatattgtgctactggcatctagcgggtagagggcaggggtgcggctaaacattcttcaatgcacaggacagcccccacaacaaagagaaccatccagtccaaaatgtcaatggtgctgaggttgagaaccctgacctaaaccagtcctggtggtctcattccctagctgttagtggtttagatcccatgatgttaagtaattctgaccaatgagacgtgagcagaaattgacaagaggagtatggcagagaatgttaatttctccctacattcactttacctttcttttcagcagaagttacattcagtgttagctaggcgcatgcccaattacagactataattcccagcctccatcgttgcaaggtgtggccaagttttggctaatgggatgtgagaaaaaaataatgagtctaatttctagaccatgtttttaagaaggagaatgcttgttctttactttctctcttaatccctttctgcacactgggtggtactgctaatccagcttcaagcaagcacatgactccagagaatggcagagcaagacagaaagacttacatacattgggactgatacatgaaaagaaaataaattgctttcttctttgaaccatcgtattttttagtttttttgttttagcagtttaagctgtatgtatatgaggtactcctggggaaggttttttcctctgtgatcacacacacacatacacacacacacacacacacacacacggagggaatattcatctaaaggatgttgtaggatttgtgtgagatggctggaaccatggctgctatcttgtgaccatgaggggaggtacctggtggttcaaaactgccctgctaagtgagaacggaataggaaggttgtaaacagcccaaatctttcttaaccttgttaagccattgagttgacgaactttgcatctgtcctgtctcaggacttcttgttaagcaagatggtatatttttcatatcgtttaaatatttggcctttaaattttcagtaatagtccttacagtgatggctttcagacagaaaattaaaaattttaaaaagtgctatcctaactgattctctcaatgtattcaagtgtaaagaaattacatgtctaacctctcatggaattagagggaaaaaatttcatgttattttaagtatgttcagttcttttattaactcatattggtttcccccctactccttacccttgcaaccaagataatttgcatctaagaggttttattctgtttccactgatatgtttagaaattactatatctgaggtgggtatattgggaaaacatacactaccactcctttgcagaaatgagggcttattgcagcagctactcgcccttgcaatgcttcctgcttggaaactcgaaggactacattgagcaggtggaataaagttgaatcgaaggttcaacttacaagcagtcaggaggaggtctgccctgaagcactgtgcagactgggacctgcagcagggctgggagggggagtgtcgaggaaatgccttttgcatgtcaatggagccccgttgctgttctgtgctgcacagccacatgaggtcatcccagattagagggtgcccatgtccaggatcttaaaccaattacttccatctccattgcttcctctaaagcctcactcttagttctacacagtaatactgcctggaaactccccaaggccaccaagctcatactaacaggtttgtgatgtgggcaaactccttacatgatctcaaaatgaaagaagaggctgttcactggaggcaatagcaaatcccctttgttcctctcttggcagatgagggccttcgctctctccctaagggttccgcctgtcaccatctgtgcacccactgtggaagggccagcgctaaggtgaatttccatttacttcctgccagcagatggctcctccttttggtctcatcttgaattgtttgccagaccagccaattagtctcctcacccttcctgaagcgtcccagggaagcaatatcatcaccagcagcctatcattataccacgtcttctaagcaccgtgattctaaatgcctgccgtggaacagaagctcattcgcacatggctctttaacccttccttgaaagacctcaattcaacattctctctctcgctcacacacacacacacacacacacaaatgcacactcacacacagtacctacaacctgatccaagataggaaacaaaatgacagtatgcggcattcaataataaatttaaaaataagacataatttcagacagaatgcagaaggaaaaacacagtaactatattttctgatccccactgaggacacaataaaaacttttttttaggccaggcacggtggctcacgtgtgtaaccccagcactgtgggaggccgaggcgggcggatcacgaggtcaggaggttgagaccatcctgactaacatggtgaaaccctgtctctactaaaaatacaaaaattagcctgacgtagtggcgtgtgcctgtaatcccagctacttgggaggctgaggcaggagaatctcttgaaccagggagttagaggttgaaatgagccgagatcgcaccactgcactccagcctggcgacagagcaagactccatcacaaaaaaaataatgatacaaaaaaattaattaaataaataaaaattaaaaataaaaaaaagtggagggtttttttttttttttttttttgacagagtcttgctctgtcgccaggctggagtgcagtggcgcaatctcggctcactgcaacctccaactctctggttcaagagattctcctgcctcagcctcccgagtagctgggattacaggcacacactaccacgtcctgctaatttttgtatttttagtagagtcgggttttaccatgttggccaggctggtcttgatctcctgacctcgtgatcctcccacctcagcctcctaaagttctgggattacgggaatgagccactgcatccggccaaaactttttttttttttaccttgtggatttgttcatatgaaagaaatcttttaaggatataaaatcaaattgcactgagttacatttaacaaagtatctttatcagaaaagagtatatagaatgacactggcaggattcttcatccccgcaacccaggatgaatgatgactttccaggctaggccaaggagattctcccagcgctattcttagaaacatcaacaaggcccttgtgcacttgttttagggtttttcatcttcagacattcctgcctgatgcctaaagaagacatattattcagggcatcccatttgaatactgtatctgctctgatgcttgagcaaagtgtctgtaaagctagacagaggggacaactgcttccatccatggggcaagggagcaatgatgagatgatggaggttaaagatatttgtgaggcagacacagcatctgtgcagaggggtagaggtatttgtttttccacttttctgctcttgttaccctaacttccttgtgttctgtgattattgcacatgagctggagtagcaggggaggttcagttccttttggtggttgaggtggcaggtaaggaggcatggacacaggacgaaccccacttttgggcaaccgccaccctgaggcaagggtgggaaaagctcactttcccataaataatcactgggctgttgtccttcagtataagtgaatataagcaaagccccaagaacagtgcctggcacataaaatgcagtagctcagggtgggctataaccacttgcatcttctacagcagtgccttgtgccagcatgccctcaataaacatttgttcagtgaaggactgtacagctctgtgccacctggcagctccaactgtcccagtggatcttcctcttcctttgttcttttccttgcaaactttgcaataaagggggcattggcccaacagttaactcccaaatcttgaacaaagaggattacccctgcaactctgttccaaactgggaagcttctggctttgtggtgagctagggactgctgaaaacaactagagattaaaagaagctggaaccagctggagaataaagaaaactgctgcaagcaagtcactgcaggaagtaccagtggtctccaaaaatgcagttgcaccagattttacatacaataaggaggattggtctctctagacaggagagagtcaagtgttcctctgagaaggaaccaactcctgtaaatcaggaaatctcaggctctcactggccaaggggcaatgggacacctccccaaggtgattcatcggctccctctgaacccagaagctcaagcccattgtgctcctttttgtagactcttctcttaccctagtccccaagaatgtgctctgtgagcaggttacacccttcacaagaccctttcatgccctgtgactcccttccccattgtttgcatagtctggcagcttctgccactttccctggtaagccctgccttaaagtgaaccctcttctgtcaatcaccaggg

SEQ ID NO: 719 - DNA, 2060 bp, Homo sapiens
ctctatcgacgagtctggtagctgagcgttgggctgtaggtcgctgtgctgtgtgatcccccagagccatgcccgagatagtggatacctgttcgttggcctctccggcttccgtctgccggaccaagcacctgcacctgcgctgcagcgtcgactttactcgccggacgctgaccgggactgctgctctcacggtccagtctcaggaggacaatctgcgcagcctggttttggatacaaaggaccttacaatagaaaaagtagtgatcaatggacaagaagtcaaatatgctcttggagaaagacaaagttacaagggatcgccaatggaaatctctcttcctatcgctttgagcaaaaatcaagaaattgttatagaaatttcttttgagacctctccaaaatcttctgctctccagtggctcactcctgaacagacttctgggaaggaacacccatatctctttagtcagtgccaggccatccactgcagagcaatccttccttgtcaggacactccttctgtgaaattaacctatactgcagaggtgtctgtccctaaagaactggtggcacttatgagtgctattcgtgatggagaaacacctgacccagaagacccaagcaggaaaatatacaaattcatccaaaaagttccaataccctgctacctgattgctttagttgttggagctttagaaagcaggcaaattggcccaagaactttggtgtggtctgagaaagagcaggtggaaaagtctgcttatgagttttctgagactgaatctatgcttaaaatagcagaagatctgggaggaccgtatgtatggggacagtatgacctattggtcctgccaccatccttcccttatggtggcatggagaatccttgccttacttttgtaactcctactctactggcaggcgacaagtcactctccaatgtcattgcacatgaaatatctcatagctggacagggaatctagtgaccaacaaaacttgggatcacttttggttaaatgagggacatactgtgtacttggaacgccacatttgcggacgattgtttggtgaaaagttcagacattttaatgctctgggaggatggggagaactacagaattcggtaaagacatttggggagacacatcctttcaccaaacttgtggttgatctgacagatatagaccctgatgtagcttattcttcagttccctatgagaagggctttgctttacttttttaccttgaacaactgcttggaggaccagagattttcctaggattcttaaaagcttatgttgagaagttttcctataagagcataactactgatgactggaaggatttcctgtattcctattttaaagataaggttgatgttctcaatcaagttgattggaatgcctggctctactctcctggactgcctcccataaagcccaattatgatatgactctgacaaatgcttgtattgccttaagtcaaagatggattactgccaaagaagatgatttaaattcattcaatgccacagacctgaaggatctctcttctcatcaattgaatgagtttttagcacagacgctccagagggcacctcttccattggggcacataaagcgaatgcaagaggtgtacaacttcaatgccattaacaattctgaaatacgattcagatggctgcggctctgcattcaatccaagtgggaggacgcaattcctttggcgctaaagatggcaactgaacaaggaagaatgaagtttacccggcccttattcaaggatcttgctgcctttgacaaatcccatgatcaagctgtccgaacctaccaagagcacaaagcaagcatgcatcccgtgactgcaatgctggtggggaaagacttaaaagtggattaaagacctgcgtattgatgattttagagatttctcttttttaaatggaattcgtaaagaaatataaaacttcagctcacaattaaaactgtctttttagttttggctttttattgttttgttggtgattttactgaaataaagatgagctacttcttc

SEQ ID NO: 720 - protein, 601 aa, Homo sapiens
MPEIVDTCSLDASVCRTKHLHLRCSVDFTRRTLTGTAALTVQSQEDNLRSLVLDTKDLTIEKVVINGQEVKYALGERQSYKGSPMEISLPIALSKNQEIVIEISFETSPKSSALQWLTPEQTSGKEHPYLFSQCQAIHCRAILPCQDTPSVKLTYTAEVSVPKELVMSAIRDGETPDPEDPSRKIYKFIQKVPIPCYLIALVVGALESRQIGPRTLVWSEKEQVEKSAYEFSETESMLKIAEDLGGPYVWGQYDLLVLPPSFPYGGMENPCLTFVTPTLLAGDKSLSNVIAHEISHSWTGNLVTNKTWDHFWLNEGHTVYLERHICGRLFGEKFRHFNALGGWGELQNSVKTFGETHPFTKLVVDLTDIDPDVAYSSVPYEKGFALLFYLEQLLGGPEIFLGFLKAYVEKFSYKSITTDDWKDFKYFKDKVDVLNQVDWNAWKPGLPPIKPNYDMTLTNACIALSQRWITAKEDDLNSFNATDLKDLSSHQLNEFLAQTLQRAPLPLGHIKRMQEVYNFNAINNSEIRFRWLRLCIQSKWEDAIPLALKMATEQGRMKFWLFKDLAAFDKSHDQAVRTYQEHKASMHPVTAMLVGKDLKVD

SEQ ID NO: 721 - DNA, 20 bp, Artificial sequence
  Synthetic primer
ggaaggaggacacttctgga

SEQ ID NO: 722 - DNA, 21 bp, Artificial sequence
  Synthetic primer
gctgtgaatggctaaacttgg

SEQ ID NO: 723 - DNA, 20 bp, Artificial sequence
  Synthetic primer
cacagaagctgcagtggaag

SEQ ID NO: 724 - DNA, 21 bp, Artificial sequence
  Synthetic primer
caaatggaggagtcaagacca

SEQ ID NO: 725 - DNA, 26 bp, Artificial sequence
  Synthetic primer
gcagtttaagctgtatgtatatgagg

SEQ ID NO: 726 - DNA, 21 bp, Artificial sequence
  Synthetic primer
tgaaagccatcactgtaagga

1. A method of prophylaxis therapy for myocardial infarction (MI) comprising:
selecting a human subject susceptible to MI by screening for a genetic variation in at least one of a 5-lipoxygenase activating protein (FLAP) gene and a leukotriene A4 hydrolase (LTA4H) gene that correlates with an increased risk of MI;
administering to the subject a composition comprising a therapeutically effective amount of an MI therapeutic agent that inhibits leukotriene synthesis in vivo; and
monitoring at least one inflammatory marker in the subject t before and during the prophylaxis treatment, wherein the MI therapeutic agent is administered in an amount effective to reduce the inflammatory marker.

2. The method of claim 1, wherein the monitoring comprises measuring serum myeloperoxidase (MPO) and C-reactive protein (CRP), and wherein the MI therapeutic agent is administered in an amount effective to reduce MPO and CRP in the subject.

3. The method of claim 1, further comprising administering a statin to the subject.

4. The method of claim 1, wherein the selecting comprises determining a FLAP genotype or haplotype of a human subject, and selecting for treatment a human subject with a FLAP genotype or haplotype that correlates with an increased risk of MI.

5. The method of claim 1, wherein the selecting comprises determining an LTA4H genotype or haploype of a human subject, and selecting for treatment a human subject with an LTA4H genotype or haplotype that correlates with an increased risk of MI.

6. The method of claim 1, wherein the selecting comprises analyzing nucleic acid of a human subject for the presence or absence of at least one FLAP polymorphism or LTA4H polymorphism that correlates with a susceptibility to myocardial infarction.

7. The method of claim 1, wherein the MI therapeutic agent inhibits activity of a leukotriene synthesis pathway protein selected from the group consisting of 5-lipoxygenase, 5-lipoxygenase activating protein (FLAP), leutokriene C4 synthase, leukriene A4 hydolase, arachidonate 4-lipoxygenase, leukotriene B4 12-hydroxydehydrogenase; leukotriene A4 receptor, leukotriene B4 receptor, leukotriene C4 receptor, leukotriene D4 receptor, leukotriene E4 receptor, leukotriene B4 receptor 1, leukotriene1 B4 receptor 2, cysteinyl leukotriene receptor 1, and cysteinyl leukotriene receptor 2.

8. The method of claim 1, wherein the MI therapeutic agent inhibits leukotriene synthesis by inhibiting the activity of at least one protein selected from 5-Lipoxygenase activating protein (FLAP) and 5-lipoxygenase (5-LO).

9. The method according of claim 1, wherein the MI therapeutic agent inhibits FLAP activity, and the composition is administered in an amount effective to inhibit FLAP polypeptide activity in the human subject.

10. The method of claim 7, wherein the MI therapeutic agent comprises a compound represented by the formula: [chemical structure]
or pharmaceutically acceptable salt thereof,
wherein R1 represents a group of the formula: [chemical structure]
R² and R³ are identical or different and represent hydrogen, lower alkyl, phenyl, benzyl or a group of the formula: [chemical structure]
R⁴ represents hydrogen, lower alkyl, phenyl or benzyl, which can optionally be substituted by hydroxyl, carboxyl, lower alkoxycarbonyl, lower alkylthio, heteroaryl or carbamoyl, R⁵ represents hydrogen, lower alkyl, phenyl or benzyl, R⁶ represents a group of the formula —COR⁵ or —CO² R⁵, R⁷ represents hydrogen, lower alkyl or phenyl, Y represents a group of the formula: [chemical structure]
wherein R⁸ represents hydrogen, lower alkyl or phenyl and n denotes a number of 0 to 5, Z represents norbornyl, or represents a group of the formula: [chemical structure]
wherein R⁹ and R¹⁰ are identical or different and denote hydrogen, lower alkyl or phenyl, or R⁹ and R¹⁰ can together form a saturated carbocyclic ring having up to 6 carbon atoms and m denotes a number from 1 to 6, and A and B are identical or different and denote hydrogen, lower alkyl or halogen, or a pharmaceutically acceptable salt thereof.

11. The method according to claim according to claim 1, wherein the MI therapeutic agent comprises a compound selected from the group consisting of: 2-[4-(quinolin-2-yl-methoxy)phenyl]-2-cyclopentylacetic acid, 2-[4-(quinolin-2-yl-methoxy)phenyl]-2-cyclohexylacetic acid, and 2-[4-(quinolin-2-yl-methoxy)phenyl]-2-cycloheptylacetic acid, (+)-enantiomer of 2-[4-(quinolin-2-yl-methoxy)phenyl]-2-cyclopentylacetic acid, (−)-enantiomer of 2-[4-(quinolin-2-yl-methoxy)phenyl]-2-cyclopentylacetic acid, and pharmaceutically acceptable salts thereof.

12. The composition according to claim 1, wherein the MI therapeutic agent comprises BAY-X-1005 or a physiologically acceptable salt, formulation, or pro-drug thereof.

13. A method according to claim 1, wherein the selecting step further comprises selecting a susceptible subject having at least one family or medical history risk factor selected from the group consisting of past or current smoker; diabetes; hypertension; serum total cholesterol>200 mg/dL; elevated serum LDL cholesterol; low serum HDL cholesterol; elevated C-reactive protein (CRP); elevated serum amyloid A; hypercholesterolemia; elevated triglycerides; elevated lp(a); obesity; acute coronary syndrome (ACS); angina; atherosclerosis; ankle/brachial index less than 0.9; transient ischemic attack; transient monocular blindness; asymptomatic carotid stenosis; claudication; limb ischemia leading to gangrene, ulceration or amputation; surgery or stent to restore coronary artery blood flow, and angioplasty.

14. A method according to claim 1, wherein the selecting step further comprises analyzing serum CRP or MPO, and selecting a subject with the presence of at least one such genetic variation and with the presence of elevated serum CRP or MPO.

15. A composition comprising a leukotriene synthesis inhibitor and a statin.

16. A composition according to claim 15, further comprising a pharmaceutically acceptable carrier.

17. The composition according to claim 15, wherein the leukotriene synthesis inhibitor is an agent that inhibits activity of a leukotriene synthesis pathway protein selected from the group consisting of 5-lipoxygenase, 5-lipoxygenase activating protein (FLAP), leutokriene C4 synthase, leukriene A4 hydolase, arachidonate 4-lipoxygenase, leukotriene B4 12-hydroxydehydrogenase; leukotriene A4 receptor, leukotriene B4 receptor, leukotriene C4 receptor, leukotriene D4 receptor, leukotriene E4 receptor, leukotriene B4 receptor 1, leukotriene B4 receptor 2, cysteinyl leukotriene receptor 1, and cysteinyl leukotriene receptor 2.

18. The composition according to claim 15, wherein the leukotriene synthesis inhibitor is selected from the group consisting of 1-((4-ch+lorophenyl)methyl)-3-((1,1-dimethylethyl)thio)-alpha,alpha-dimethyl-5-( 2-quinolinylmethoxy)-1H-Indole-2-propanoic acid, (R)-(+)-alpha-cyclopentyl-4-(2-quinolinylmethoxy)-Benzeneacetic acid, 3-(3-(1,1-dimethylethylthio-5-(quinoline-2-ylmethoxy)-1-(4-chloromethylphenyl)indole-2-yl)-2,2-dimethylpropionaldehyde oxime-0-2-acetic acid, zileuton, atreleuton, 6-((3-fluoro-5-(tetrahydro-4-methoxy-2H-pyran-4yl)phenoxy)methyl)-1-methyl-2(1H)-quinlolinone, 1-((4-chlorophenyl)methyl)-3-((1,1 dimethylethyl)thio)-alpha,alpha-dimethyl-5-(2-quinolinylmethoxy)-1 H-Indole-2-propanoic acid and 4-(3-(4-(2-Methyl-imidazol-1-yl)-phenylsulfanyl)-phenyl)-tetrahydro-pyran-4-carboxylic acid amide.

19. The composition according to claim 15, wherein the leukotriene synthesis inhibitor is a FLAP inhibitor.

20. The composition according to claim 19, wherein the FLAP inhibitor comprises a compound represented by the formula: [chemical structure]
or pharmaceutically acceptable salt thereof,
wherein R¹ represents a group of the formula: [chemical structure]
R² and R³ are identical or different and represent hydrogen, lower alkyl, phenyl, benzyl or a group of the formula: [chemical structure]
R⁴ represents hydrogen, lower alkyl, phenyl or benzyl, which can optionally be substituted by hydroxyl, carboxyl, lower alkoxycarbonyl, lower alkylthio, heteroaryl or carbamoyl, R⁵ represents hydrogen, lower alkyl, phenyl or benzyl, R⁶ represents a group of the formula —COR⁵ or —CO² R⁵, R⁷ represents hydrogen, lower alkyl or phenyl, Y represents a group of the formula: [chemical structure]
wherein R⁸ represents hydrogen, lower alkyl or phenyl and n denotes a number, of 0 to 5, Z represents norbornyl, or represents a group of the formula: [chemical structure]
wherein R⁹ and R¹⁰ are identical or different and denote hydrogen, lower alkyl or phenyl, or R⁹ and R¹⁰ can together form a saturated carbocyclic ring having up to 6 carbon atoms and m denotes a number from 1 to 6, and A and B are identical or different and denote hydrogen, lower alkyl or halogen, or a pharmaceutically acceptable salt thereof.

21. The composition according to claim 19, wherein the FLAP inhibitor comprises BAY-X-1005 or a physiologically acceptable salt, formulation, or pro-drug thereof.

22. The composition according to claim 15, wherein the leukotriene synthesis inhibitor is (R)-(+)-alpha-cyclopentyl-4-(2-quinolinylmethoxy)-Benzeneacetic acid.

23. The composition according to claim 15, wherein the statin is selected from the group consisting of rovuvastatin, fluvastatin, atorvastatin, lovastatin, simvastatin, pravastatin or pitavastatin.

24. The composition according to claim 15, wherein the leukotriene synthesis inhibitor and the statin are included in the composition in amounts effective to reduce serum C-reactive protein (CRP), serum myeloperoxidase, and serum low density lipoprotein cholesterol (LDL) in a human subject.

25. The composition according to claim 15, wherein the leukotriene inhibitor and the statin are included in the composition in amounts effective to synergistically reduce serum C-reactive protein in a human subject.

26. A method of reducing C reactive protein (CRP) in a human subject, comprising:
selecting a human subject that receives statin therapy to reduce serum LDL, wherein the statin therapy optionally reduces serum CRP in the human subject; and
administering to the human subject a leukotriene synthesis antagonist, in an amount effective to further reduce CRP in the human subject.

27. A method of reducing C reactive protein (CRP) in a human subject, comprising:
identifying a human subject in need of treatment to reduce serum CRP;
administering to the human subject a composition comprising a statin;
administering to the human subject a composition comprising a leukotriene synthesis inhibitor,
wherein the statin and the leukotriene synthesis inhibitor are administered in amounts effective to reduce serum CRP in the human subject.
